United States Patent Application Publication US 2017/0314015 A1 - sequence listing, part 2

SEQ ID NO: 15054 - RNA, 23 nt, Artificial Sequence
  Synthetic
uucggccccuggcguccacacgc

SEQ ID NO: 15055 - RNA, 24 nt, Artificial Sequence
  Synthetic
cuucggccccuggcguccacacgc

SEQ ID NO: 15056 - RNA, 18 nt, Artificial Sequence
  Synthetic
ccccucuuuccaggccgc

SEQ ID NO: 15057 - RNA, 19 nt, Artificial Sequence
  Synthetic
uccccucuuuccaggccgc

SEQ ID NO: 15058 - RNA, 20 nt, Artificial Sequence
  Synthetic
guccccucuuuccaggccgc

SEQ ID NO: 15059 - RNA, 21 nt, Artificial Sequence
  Synthetic
gguccccucuuuccaggccgc

SEQ ID NO: 15060 - RNA, 22 nt, Artificial Sequence
  Synthetic
cgguccccucuuuccaggccgc

SEQ ID NO: 15061 - RNA, 23 nt, Artificial Sequence
  Synthetic
ccgguccccucuuuccaggccgc

SEQ ID NO: 15062 - RNA, 24 nt, Artificial Sequence
  Synthetic
cccgguccccucuuuccaggccgc

SEQ ID NO: 15063 - RNA, 18 nt, Artificial Sequence
  Synthetic
gccgccuuuuguuccggc

SEQ ID NO: 15064 - RNA, 19 nt, Artificial Sequence
  Synthetic
ugccgccuuuuguuccggc

SEQ ID NO: 15065 - RNA, 20 nt, Artificial Sequence
  Synthetic
cugccgccuuuuguuccggc

SEQ ID NO: 15066 - RNA, 21 nt, Artificial Sequence
  Synthetic
acugccgccuuuuguuccggc

SEQ ID NO: 15067 - RNA, 22 nt, Artificial Sequence
  Synthetic
cacugccgccuuuuguuccggc

SEQ ID NO: 15068 - RNA, 23 nt, Artificial Sequence
  Synthetic
gcacugccgccuuuuguuccggc

SEQ ID NO: 15069 - RNA, 24 nt, Artificial Sequence
  Synthetic
ggcacugccgccuuuuguuccggc

SEQ ID NO: 15070 - RNA, 18 nt, Artificial Sequence
  Synthetic
agcgagcgcggcggcggc

SEQ ID NO: 15071 - RNA, 19 nt, Artificial Sequence
  Synthetic
gagcgagcgcggcggcggc

SEQ ID NO: 15072 - RNA, 20 nt, Artificial Sequence
  Synthetic
ggagcgagcgcggcggcggc

SEQ ID NO: 15073 - RNA, 21 nt, Artificial Sequence
  Synthetic
gggagcgagcgcggcggcggc

SEQ ID NO: 15074 - RNA, 22 nt, Artificial Sequence
  Synthetic
ggggagcgagcgcggcggcggc

SEQ ID NO: 15075 - RNA, 23 nt, Artificial Sequence
  Synthetic
cggggagcgagcgcggcggcggc

SEQ ID NO: 15076 - RNA, 24 nt, Artificial Sequence
  Synthetic
gcggggagcgagcgcggcggcggc

SEQ ID NO: 15077 - RNA, 18 nt, Artificial Sequence
  Synthetic
ccgagcgcagccgcgggc

SEQ ID NO: 15078 - RNA, 19 nt, Artificial Sequence
  Synthetic
cccgagcgcagccgcgggc

SEQ ID NO: 15079 - RNA, 20 nt, Artificial Sequence
  Synthetic
ucccgagcgcagccgcgggc

SEQ ID NO: 15080 - RNA, 21 nt, Artificial Sequence
  Synthetic
uucccgagcgcagccgcgggc

SEQ ID NO: 15081 - RNA, 22 nt, Artificial Sequence
  Synthetic
uuucccgagcgcagccgcgggc

SEQ ID NO: 15082 - RNA, 23 nt, Artificial Sequence
  Synthetic
guuucccgagcgcagccgcgggc

SEQ ID NO: 15083 - RNA, 24 nt, Artificial Sequence
  Synthetic
aguuucccgagcgcagccgcgggc

SEQ ID NO: 15084 - RNA, 18 nt, Artificial Sequence
  Synthetic
uccaggccgcgcgggcuc

SEQ ID NO: 15085 - RNA, 19 nt, Artificial Sequence
  Synthetic
uuccaggccgcgcgggcuc

SEQ ID NO: 15086 - RNA, 20 nt, Artificial Sequence
  Synthetic
uuuccaggccgcgcgggcuc

SEQ ID NO: 15087 - RNA, 21 nt, Artificial Sequence
  Synthetic
cuuuccaggccgcgcgggcuc

SEQ ID NO: 15088 - RNA, 22 nt, Artificial Sequence
  Synthetic
ucuuuccaggccgcgcgggcuc

SEQ ID NO: 15089 - RNA, 23 nt, Artificial Sequence
  Synthetic
cucuuuccaggccgcgcgggcuc

SEQ ID NO: 15090 - RNA, 24 nt, Artificial Sequence
  Synthetic
ccucuuuccaggccgcgcgggcuc

SEQ ID NO: 15091 - RNA, 18 nt, Artificial Sequence
  Synthetic
uccugaguccgcggaguc

SEQ ID NO: 15092 - RNA, 19 nt, Artificial Sequence
  Synthetic
cuccugaguccgcggaguc

SEQ ID NO: 15093 - RNA, 20 nt, Artificial Sequence
  Synthetic
gcuccugaguccgcggaguc

SEQ ID NO: 15094 - RNA, 21 nt, Artificial Sequence
  Synthetic
cgcuccugaguccgcggaguc

SEQ ID NO: 15095 - RNA, 22 nt, Artificial Sequence
  Synthetic
gcgcuccugaguccgcggaguc

SEQ ID NO: 15096 - RNA, 23 nt, Artificial Sequence
  Synthetic
ggcgcuccugaguccgcggaguc

SEQ ID NO: 15097 - RNA, 24 nt, Artificial Sequence
  Synthetic
cggcgcuccugaguccgcggaguc

SEQ ID NO: 15098 - RNA, 18 nt, Artificial Sequence
  Synthetic
cguacggaggaggguguc

SEQ ID NO: 15099 - RNA, 19 nt, Artificial Sequence
  Synthetic
gcguacggaggaggguguc

SEQ ID NO: 15100 - RNA, 20 nt, Artificial Sequence
  Synthetic
ugcguacggaggaggguguc

SEQ ID NO: 15101 - RNA, 21 nt, Artificial Sequence
  Synthetic
gugcguacggaggaggguguc

SEQ ID NO: 15102 - RNA, 22 nt, Artificial Sequence
  Synthetic
ugugcguacggaggaggguguc

SEQ ID NO: 15103 - RNA, 23 nt, Artificial Sequence
  Synthetic
gugugcguacggaggaggguguc

SEQ ID NO: 15104 - RNA, 24 nt, Artificial Sequence
  Synthetic
ggugugcguacggaggaggguguc

SEQ ID NO: 15105 - RNA, 18 nt, Artificial Sequence
  Synthetic
aagucuaaaaaacgauuc

SEQ ID NO: 15106 - RNA, 19 nt, Artificial Sequence
  Synthetic
caagucuaaaaaacgauuc

SEQ ID NO: 15107 - RNA, 20 nt, Artificial Sequence
  Synthetic
acaagucuaaaaaacgauuc

SEQ ID NO: 15108 - RNA, 21 nt, Artificial Sequence
  Synthetic
uacaagucuaaaaaacgauuc

SEQ ID NO: 15109 - RNA, 22 nt, Artificial Sequence
  Synthetic
guacaagucuaaaaaacgauuc

SEQ ID NO: 15110 - RNA, 23 nt, Artificial Sequence
  Synthetic
aguacaagucuaaaaaacgauuc

SEQ ID NO: 15111 - RNA, 24 nt, Artificial Sequence
  Synthetic
gaguacaagucuaaaaaacgauuc

SEQ ID NO: 15112 - RNA, 18 nt, Artificial Sequence
  Synthetic
cuccucgggcaaaguuuc

SEQ ID NO: 15113 - RNA, 19 nt, Artificial Sequence
  Synthetic
ucuccucgggcaaaguuuc

SEQ ID NO: 15114 - RNA, 20 nt, Artificial Sequence
  Synthetic
cucuccucgggcaaaguuuc

SEQ ID NO: 15115 - RNA, 21 nt, Artificial Sequence
  Synthetic
ccucuccucgggcaaaguuuc

SEQ ID NO: 15116 - RNA, 22 nt, Artificial Sequence
  Synthetic
uccucuccucgggcaaaguuuc

SEQ ID NO: 15117 - RNA, 23 nt, Artificial Sequence
  Synthetic
guccucuccucgggcaaaguuuc

SEQ ID NO: 15118 - RNA, 24 nt, Artificial Sequence
  Synthetic
uguccucuccucgggcaaaguuuc

SEQ ID NO: 15119 - RNA, 18 nt, Artificial Sequence
  Synthetic
ucacggucaagugugcag

SEQ ID NO: 15120 - RNA, 19 nt, Artificial Sequence
  Synthetic
cucacggucaagugugcag

SEQ ID NO: 15121 - RNA, 20 nt, Artificial Sequence
  Synthetic
gcucacggucaagugugcag

SEQ ID NO: 15122 - RNA, 21 nt, Artificial Sequence
  Synthetic
cgcucacggucaagugugcag

SEQ ID NO: 15123 - RNA, 22 nt, Artificial Sequence
  Synthetic
gcgcucacggucaagugugcag

SEQ ID NO: 15124 - RNA, 23 nt, Artificial Sequence
  Synthetic
cgcgcucacggucaagugugcag

SEQ ID NO: 15125 - RNA, 24 nt, Artificial Sequence
  Synthetic
gcgcgcucacggucaagugugcag

SEQ ID NO: 15126 - RNA, 18 nt, Artificial Sequence
  Synthetic
uucccggggagaaaagag

SEQ ID NO: 15127 - RNA, 19 nt, Artificial Sequence
  Synthetic
auucccggggagaaaagag

SEQ ID NO: 15128 - RNA, 20 nt, Artificial Sequence
  Synthetic
gauucccggggagaaaagag

SEQ ID NO: 15129 - RNA, 21 nt, Artificial Sequence
  Synthetic
cgauucccggggagaaaagag

SEQ ID NO: 15130 - RNA, 22 nt, Artificial Sequence
  Synthetic
acgauucccggggagaaaagag

SEQ ID NO: 15131 - RNA, 23 nt, Artificial Sequence
  Synthetic
aacgauucccggggagaaaagag

SEQ ID NO: 15132 - RNA, 24 nt, Artificial Sequence
  Synthetic
aaacgauucccggggagaaaagag

SEQ ID NO: 15133 - RNA, 18 nt, Artificial Sequence
  Synthetic
gcuccugaguccgcggag

SEQ ID NO: 15134 - RNA, 19 nt, Artificial Sequence
  Synthetic
cgcuccugaguccgcggag

SEQ ID NO: 15135 - RNA, 20 nt, Artificial Sequence
  Synthetic
gcgcuccugaguccgcggag

SEQ ID NO: 15136 - RNA, 21 nt, Artificial Sequence
  Synthetic
ggcgcuccugaguccgcggag

SEQ ID NO: 15137 - RNA, 22 nt, Artificial Sequence
  Synthetic
cggcgcuccugaguccgcggag

SEQ ID NO: 15138 - RNA, 23 nt, Artificial Sequence
  Synthetic
ccggcgcuccugaguccgcggag

SEQ ID NO: 15139 - RNA, 24 nt, Artificial Sequence
  Synthetic
cccggcgcuccugaguccgcggag

SEQ ID NO: 15140 - RNA, 18 nt, Artificial Sequence
  Synthetic
aguccgcggagucgggag

SEQ ID NO: 15141 - RNA, 19 nt, Artificial Sequence
  Synthetic
gaguccgcggagucgggag

SEQ ID NO: 15142 - RNA, 20 nt, Artificial Sequence
  Synthetic
ugaguccgcggagucgggag

SEQ ID NO: 15143 - RNA, 21 nt, Artificial Sequence
  Synthetic
cugaguccgcggagucgggag

SEQ ID NO: 15144 - RNA, 22 nt, Artificial Sequence
  Synthetic
ccugaguccgcggagucgggag

SEQ ID NO: 15145 - RNA, 23 nt, Artificial Sequence
  Synthetic
uccugaguccgcggagucgggag

SEQ ID NO: 15146 - RNA, 24 nt, Artificial Sequence
  Synthetic
cuccugaguccgcggagucgggag

SEQ ID NO: 15147 - RNA, 18 nt, Artificial Sequence
  Synthetic
cgcggcggcggcggggag

SEQ ID NO: 15148 - RNA, 19 nt, Artificial Sequence
  Synthetic
gcgcggcggcggcggggag

SEQ ID NO: 15149 - RNA, 20 nt, Artificial Sequence
  Synthetic
agcgcggcggcggcggggag

SEQ ID NO: 15150 - RNA, 21 nt, Artificial Sequence
  Synthetic
gagcgcggcggcggcggggag

SEQ ID NO: 15151 - RNA, 22 nt, Artificial Sequence
  Synthetic
cgagcgcggcggcggcggggag

SEQ ID NO: 15152 - RNA, 23 nt, Artificial Sequence
  Synthetic
gcgagcgcggcggcggcggggag

SEQ ID NO: 15153 - RNA, 24 nt, Artificial Sequence
  Synthetic
agcgagcgcggcggcggcggggag

SEQ ID NO: 15154 - RNA, 18 nt, Artificial Sequence
  Synthetic
cgcgugugugggggggag

SEQ ID NO: 15155 - RNA, 19 nt, Artificial Sequence
  Synthetic
ccgcgugugugggggggag

SEQ ID NO: 15156 - RNA, 20 nt, Artificial Sequence
  Synthetic
uccgcgugugugggggggag

SEQ ID NO: 15157 - RNA, 21 nt, Artificial Sequence
  Synthetic
guccgcgugugugggggggag

SEQ ID NO: 15158 - RNA, 22 nt, Artificial Sequence
  Synthetic
aguccgcgugugugggggggag

SEQ ID NO: 15159 - RNA, 23 nt, Artificial Sequence
  Synthetic
gaguccgcgugugugggggggag

SEQ ID NO: 15160 - RNA, 24 nt, Artificial Sequence
  Synthetic
agaguccgcgugugugggggggag

SEQ ID NO: 15161 - RNA, 18 nt, Artificial Sequence
  Synthetic
gccccuggcguccacacg

SEQ ID NO: 15162 - RNA, 19 nt, Artificial Sequence
  Synthetic
ggccccuggcguccacacg

SEQ ID NO: 15163 - RNA, 20 nt, Artificial Sequence
  Synthetic
cggccccuggcguccacacg

SEQ ID NO: 15164 - RNA, 21 nt, Artificial Sequence
  Synthetic
ucggccccuggcguccacacg

SEQ ID NO: 15165 - RNA, 22 nt, Artificial Sequence
  Synthetic
uucggccccuggcguccacacg

SEQ ID NO: 15166 - RNA, 23 nt, Artificial Sequence
  Synthetic
cuucggccccuggcguccacacg

SEQ ID NO: 15167 - RNA, 24 nt, Artificial Sequence
  Synthetic
acuucggccccuggcguccacacg

SEQ ID NO: 15168 - RNA, 18 nt, Artificial Sequence
  Synthetic
agaggggccgcggcgacg

SEQ ID NO: 15169 - RNA, 19 nt, Artificial Sequence
  Synthetic
gagaggggccgcggcgacg

SEQ ID NO: 15170 - RNA, 20 nt, Artificial Sequence
  Synthetic
ggagaggggccgcggcgacg

SEQ ID NO: 15171 - RNA, 21 nt, Artificial Sequence
  Synthetic
gggagaggggccgcggcgacg

SEQ ID NO: 15172 - RNA, 22 nt, Artificial Sequence
  Synthetic
cgggagaggggccgcggcgacg

SEQ ID NO: 15173 - RNA, 23 nt, Artificial Sequence
  Synthetic
ucgggagaggggccgcggcgacg

SEQ ID NO: 15174 - RNA, 24 nt, Artificial Sequence
  Synthetic
gucgggagaggggccgcggcgacg

SEQ ID NO: 15175 - RNA, 18 nt, Artificial Sequence
  Synthetic
gaagugggugugcguacg

SEQ ID NO: 15176 - RNA, 19 nt, Artificial Sequence
  Synthetic
ggaagugggugugcguacg

SEQ ID NO: 15177 - RNA, 20 nt, Artificial Sequence
  Synthetic
gggaagugggugugcguacg

SEQ ID NO: 15178 - RNA, 21 nt, Artificial Sequence
  Synthetic
ggggaagugggugugcguacg

SEQ ID NO: 15179 - RNA, 22 nt, Artificial Sequence
  Synthetic
aggggaagugggugugcguacg

SEQ ID NO: 15180 - RNA, 23 nt, Artificial Sequence
  Synthetic
gaggggaagugggugugcguacg

SEQ ID NO: 15181 - RNA, 24 nt, Artificial Sequence
  Synthetic
ggaggggaagugggugugcguacg

SEQ ID NO: 15182 - RNA, 18 nt, Artificial Sequence
  Synthetic
ucuaaaaaacgauucccg

SEQ ID NO: 15183 - RNA, 19 nt, Artificial Sequence
  Synthetic
gucuaaaaaacgauucccg

SEQ ID NO: 15184 - RNA, 20 nt, Artificial Sequence
  Synthetic
agucuaaaaaacgauucccg

SEQ ID NO: 15185 - RNA, 21 nt, Artificial Sequence
  Synthetic
aagucuaaaaaacgauucccg

SEQ ID NO: 15186 - RNA, 22 nt, Artificial Sequence
  Synthetic
caagucuaaaaaacgauucccg

SEQ ID NO: 15187 - RNA, 23 nt, Artificial Sequence
  Synthetic
acaagucuaaaaaacgauucccg

SEQ ID NO: 15188 - RNA, 24 nt, Artificial Sequence
  Synthetic
uacaagucuaaaaaacgauucccg

SEQ ID NO: 15189 - RNA, 18 nt, Artificial Sequence
  Synthetic
cggcgacggggagagccg

SEQ ID NO: 15190 - RNA, 19 nt, Artificial Sequence
  Synthetic
gcggcgacggggagagccg

SEQ ID NO: 15191 - RNA, 20 nt, Artificial Sequence
  Synthetic
cgcggcgacggggagagccg

SEQ ID NO: 15192 - RNA, 21 nt, Artificial Sequence
  Synthetic
ccgcggcgacggggagagccg

SEQ ID NO: 15193 - RNA, 22 nt, Artificial Sequence
  Synthetic
gccgcggcgacggggagagccg

SEQ ID NO: 15194 - RNA, 23 nt, Artificial Sequence
  Synthetic
ggccgcggcgacggggagagccg

SEQ ID NO: 15195 - RNA, 24 nt, Artificial Sequence
  Synthetic
gggccgcggcgacggggagagccg

SEQ ID NO: 15196 - RNA, 18 nt, Artificial Sequence
  Synthetic
cccuggcguccacacgcg

SEQ ID NO: 15197 - RNA, 19 nt, Artificial Sequence
  Synthetic
ccccuggcguccacacgcg

SEQ ID NO: 15198 - RNA, 20 nt, Artificial Sequence
  Synthetic
gccccuggcguccacacgcg

SEQ ID NO: 15199 - RNA, 21 nt, Artificial Sequence
  Synthetic
ggccccuggcguccacacgcg

SEQ ID NO: 15200 - RNA, 22 nt, Artificial Sequence
  Synthetic
cggccccuggcguccacacgcg

SEQ ID NO: 15201 - RNA, 23 nt, Artificial Sequence
  Synthetic
ucggccccuggcguccacacgcg

SEQ ID NO: 15202 - RNA, 24 nt, Artificial Sequence
  Synthetic
uucggccccuggcguccacacgcg

SEQ ID NO: 15203 - RNA, 18 nt, Artificial Sequence
  Synthetic
gggagaggggccgcggcg

SEQ ID NO: 15204 - RNA, 19 nt, Artificial Sequence
  Synthetic
cgggagaggggccgcggcg

SEQ ID NO: 15205 - RNA, 20 nt, Artificial Sequence
  Synthetic
ucgggagaggggccgcggcg

SEQ ID NO: 15206 - RNA, 21 nt, Artificial Sequence
  Synthetic
gucgggagaggggccgcggcg

SEQ ID NO: 15207 - RNA, 22 nt, Artificial Sequence
  Synthetic
agucgggagaggggccgcggcg

SEQ ID NO: 15208 - RNA, 23 nt, Artificial Sequence
  Synthetic
gagucgggagaggggccgcggcg

SEQ ID NO: 15209 - RNA, 24 nt, Artificial Sequence
  Synthetic
ggagucgggagaggggccgcggcg

SEQ ID NO: 15210 - RNA, 18 nt, Artificial Sequence
  Synthetic
ggagcgagcgcggcggcg

SEQ ID NO: 15211 - RNA, 19 nt, Artificial Sequence
  Synthetic
gggagcgagcgcggcggcg

SEQ ID NO: 15212 - RNA, 20 nt, Artificial Sequence
  Synthetic
ggggagcgagcgcggcggcg

SEQ ID NO: 15213 - RNA, 21 nt, Artificial Sequence
  Synthetic
cggggagcgagcgcggcggcg

SEQ ID NO: 15214 - RNA, 22 nt, Artificial Sequence
  Synthetic
gcggggagcgagcgcggcggcg

SEQ ID NO: 15215 - RNA, 23 nt, Artificial Sequence
  Synthetic
cgcggggagcgagcgcggcggcg

SEQ ID NO: 15216 - RNA, 24 nt, Artificial Sequence
  Synthetic
acgcggggagcgagcgcggcggcg

SEQ ID NO: 15217 - RNA, 18 nt, Artificial Sequence
  Synthetic
gcgagcgcggcggcggcg

SEQ ID NO: 15218 - RNA, 19 nt, Artificial Sequence
  Synthetic
agcgagcgcggcggcggcg

SEQ ID NO: 15219 - RNA, 20 nt, Artificial Sequence
  Synthetic
gagcgagcgcggcggcggcg

SEQ ID NO: 15220 - RNA, 21 nt, Artificial Sequence
  Synthetic
ggagcgagcgcggcggcggcg

SEQ ID NO: 15221 - RNA, 22 nt, Artificial Sequence
  Synthetic
gggagcgagcgcggcggcggcg

SEQ ID NO: 15222 - RNA, 23 nt, Artificial Sequence
  Synthetic
ggggagcgagcgcggcggcggcg

SEQ ID NO: 15223 - RNA, 24 nt, Artificial Sequence
  Synthetic
cggggagcgagcgcggcggcggcg

SEQ ID NO: 15224 - RNA, 18 nt, Artificial Sequence
  Synthetic
gccgugggaccgggaagg

SEQ ID NO: 15225 - RNA, 19 nt, Artificial Sequence
  Synthetic
agccgugggaccgggaagg

SEQ ID NO: 15226 - RNA, 20 nt, Artificial Sequence
  Synthetic
gagccgugggaccgggaagg

SEQ ID NO: 15227 - RNA, 21 nt, Artificial Sequence
  Synthetic
agagccgugggaccgggaagg

SEQ ID NO: 15228 - RNA, 22 nt, Artificial Sequence
  Synthetic
gagagccgugggaccgggaagg

SEQ ID NO: 15229 - RNA, 23 nt, Artificial Sequence
  Synthetic
ggagagccgugggaccgggaagg

SEQ ID NO: 15230 - RNA, 24 nt, Artificial Sequence
  Synthetic
gggagagccgugggaccgggaagg

SEQ ID NO: 15231 - RNA, 18 nt, Artificial Sequence
  Synthetic
agaaaauggggggguagg

SEQ ID NO: 15232 - RNA, 19 nt, Artificial Sequence
  Synthetic
aagaaaauggggggguagg

SEQ ID NO: 15233 - RNA, 20 nt, Artificial Sequence
  Synthetic
uaagaaaauggggggguagg

SEQ ID NO: 15234 - RNA, 21 nt, Artificial Sequence
  Synthetic
guaagaaaauggggggguagg

SEQ ID NO: 15235 - RNA, 22 nt, Artificial Sequence
  Synthetic
cguaagaaaauggggggguagg

SEQ ID NO: 15236 - RNA, 23 nt, Artificial Sequence
  Synthetic
ccguaagaaaauggggggguagg

SEQ ID NO: 15237 - RNA, 24 nt, Artificial Sequence
  Synthetic
accguaagaaaauggggggguagg

SEQ ID NO: 15238 - RNA, 18 nt, Artificial Sequence
  Synthetic
aagugggugugcguacgg

SEQ ID NO: 15239 - RNA, 19 nt, Artificial Sequence
  Synthetic
gaagugggugugcguacgg

SEQ ID NO: 15240 - RNA, 20 nt, Artificial Sequence
  Synthetic
ggaagugggugugcguacgg

SEQ ID NO: 15241 - RNA, 21 nt, Artificial Sequence
  Synthetic
gggaagugggugugcguacgg

SEQ ID NO: 15242 - RNA, 22 nt, Artificial Sequence
  Synthetic
ggggaagugggugugcguacgg

SEQ ID NO: 15243 - RNA, 23 nt, Artificial Sequence
  Synthetic
aggggaagugggugugcguacgg

SEQ ID NO: 15244 - RNA, 24 nt, Artificial Sequence
  Synthetic
gaggggaagugggugugcguacgg

SEQ ID NO: 15245 - RNA, 18 nt, Artificial Sequence
  Synthetic
cggucaagugugcagcgg

SEQ ID NO: 15246 - RNA, 19 nt, Artificial Sequence
  Synthetic
acggucaagugugcagcgg

SEQ ID NO: 15247 - RNA, 20 nt, Artificial Sequence
  Synthetic
cacggucaagugugcagcgg

SEQ ID NO: 15248 - RNA, 21 nt, Artificial Sequence
  Synthetic
ucacggucaagugugcagcgg

SEQ ID NO: 15249 - RNA, 22 nt, Artificial Sequence
  Synthetic
cucacggucaagugugcagcgg

SEQ ID NO: 15250 - RNA, 23 nt, Artificial Sequence
  Synthetic
gcucacggucaagugugcagcgg

SEQ ID NO: 15251 - RNA, 24 nt, Artificial Sequence
  Synthetic
cgcucacggucaagugugcagcgg

SEQ ID NO: 15252 - RNA, 18 nt, Artificial Sequence
  Synthetic
gagcgagcgcggcggcgg

SEQ ID NO: 15253 - RNA, 19 nt, Artificial Sequence
  Synthetic
ggagcgagcgcggcggcgg

SEQ ID NO: 15254 - RNA, 20 nt, Artificial Sequence
  Synthetic
gggagcgagcgcggcggcgg

SEQ ID NO: 15255 - RNA, 21 nt, Artificial Sequence
  Synthetic
ggggagcgagcgcggcggcgg

SEQ ID NO: 15256 - RNA, 22 nt, Artificial Sequence
  Synthetic
cggggagcgagcgcggcggcgg

SEQ ID NO: 15257 - RNA, 23 nt, Artificial Sequence
  Synthetic
gcggggagcgagcgcggcggcgg

SEQ ID NO: 15258 - RNA, 24 nt, Artificial Sequence
  Synthetic
cgcggggagcgagcgcggcggcgg

SEQ ID NO: 15259 - RNA, 18 nt, Artificial Sequence
  Synthetic
cugaguccgcggagucgg

SEQ ID NO: 15260 - RNA, 19 nt, Artificial Sequence
  Synthetic
ccugaguccgcggagucgg

SEQ ID NO: 15261 - RNA, 20 nt, Artificial Sequence
  Synthetic
uccugaguccgcggagucgg

SEQ ID NO: 15262 - RNA, 21 nt, Artificial Sequence
  Synthetic
cuccugaguccgcggagucgg

SEQ ID NO: 15263 - RNA, 22 nt, Artificial Sequence
  Synthetic
gcuccugaguccgcggagucgg

SEQ ID NO: 15264 - RNA, 23 nt, Artificial Sequence
  Synthetic
cgcuccugaguccgcggagucgg

SEQ ID NO: 15265 - RNA, 24 nt, Artificial Sequence
  Synthetic
gcgcuccugaguccgcggagucgg

SEQ ID NO: 15266 - RNA, 18 nt, Artificial Sequence
  Synthetic
gaaaauggggggguaggg

SEQ ID NO: 15267 - RNA, 19 nt, Artificial Sequence
  Synthetic
agaaaauggggggguaggg

SEQ ID NO: 15268 - RNA, 20 nt, Artificial Sequence
  Synthetic
aagaaaauggggggguaggg

SEQ ID NO: 15269 - RNA, 21 nt, Artificial Sequence
  Synthetic
uaagaaaauggggggguaggg

SEQ ID NO: 15270 - RNA, 22 nt, Artificial Sequence
  Synthetic
guaagaaaauggggggguaggg

SEQ ID NO: 15271 - RNA, 23 nt, Artificial Sequence
  Synthetic
cguaagaaaauggggggguaggg

SEQ ID NO: 15272 - RNA, 24 nt, Artificial Sequence
  Synthetic
ccguaagaaaauggggggguaggg

SEQ ID NO: 15273 - RNA, 18 nt, Artificial Sequence
  Synthetic
aggggccgcggcgacggg

SEQ ID NO: 15274 - RNA, 19 nt, Artificial Sequence
  Synthetic
gaggggccgcggcgacggg

SEQ ID NO: 15275 - RNA, 20 nt, Artificial Sequence
  Synthetic
agaggggccgcggcgacggg

SEQ ID NO: 15276 - RNA, 21 nt, Artificial Sequence
  Synthetic
gagaggggccgcggcgacggg

SEQ ID NO: 15277 - RNA, 22 nt, Artificial Sequence
  Synthetic
ggagaggggccgcggcgacggg

SEQ ID NO: 15278 - RNA, 23 nt, Artificial Sequence
  Synthetic
gggagaggggccgcggcgacggg

SEQ ID NO: 15279 - RNA, 24 nt, Artificial Sequence
  Synthetic
cgggagaggggccgcggcgacggg

SEQ ID NO: 15280 - RNA, 18 nt, Artificial Sequence
  Synthetic
gagagccgugggaccggg

SEQ ID NO: 15281 - RNA, 19 nt, Artificial Sequence
  Synthetic
ggagagccgugggaccggg

SEQ ID NO: 15282 - RNA, 20 nt, Artificial Sequence
  Synthetic
gggagagccgugggaccggg

SEQ ID NO: 15283 - RNA, 21 nt, Artificial Sequence
  Synthetic
ggggagagccgugggaccggg

SEQ ID NO: 15284 - RNA, 22 nt, Artificial Sequence
  Synthetic
cggggagagccgugggaccggg

SEQ ID NO: 15285 - RNA, 23 nt, Artificial Sequence
  Synthetic
acggggagagccgugggaccggg

SEQ ID NO: 15286 - RNA, 24 nt, Artificial Sequence
  Synthetic
gacggggagagccgugggaccggg

SEQ ID NO: 15287 - RNA, 18 nt, Artificial Sequence
  Synthetic
uaaaaaacgauucccggg

SEQ ID NO: 15288 - RNA, 19 nt, Artificial Sequence
  Synthetic
cuaaaaaacgauucccggg

SEQ ID NO: 15289 - RNA, 20 nt, Artificial Sequence
  Synthetic
ucuaaaaaacgauucccggg

SEQ ID NO: 15290 - RNA, 21 nt, Artificial Sequence
  Synthetic
gucuaaaaaacgauucccggg

SEQ ID NO: 15291 - RNA, 22 nt, Artificial Sequence
  Synthetic
agucuaaaaaacgauucccggg

SEQ ID NO: 15292 - RNA, 23 nt, Artificial Sequence
  Synthetic
aagucuaaaaaacgauucccggg

SEQ ID NO: 15293 - RNA, 24 nt, Artificial Sequence
  Synthetic
caagucuaaaaaacgauucccggg

SEQ ID NO: 15294 - RNA, 18 nt, Artificial Sequence
  Synthetic
ggucaagugugcagcggg

SEQ ID NO: 15295 - RNA, 19 nt, Artificial Sequence
  Synthetic
cggucaagugugcagcggg

SEQ ID NO: 15296 - RNA, 20 nt, Artificial Sequence
  Synthetic
acggucaagugugcagcggg

SEQ ID NO: 15297 - RNA, 21 nt, Artificial Sequence
  Synthetic
cacggucaagugugcagcggg

SEQ ID NO: 15298 - RNA, 22 nt, Artificial Sequence
  Synthetic
ucacggucaagugugcagcggg

SEQ ID NO: 15299 - RNA, 23 nt, Artificial Sequence
  Synthetic
cucacggucaagugugcagcggg

SEQ ID NO: 15300 - RNA, 24 nt, Artificial Sequence
  Synthetic
gcucacggucaagugugcagcggg

SEQ ID NO: 15301 - RNA, 18 nt, Artificial Sequence
  Synthetic
gagcgcggcggcggcggg

SEQ ID NO: 15302 - RNA, 19 nt, Artificial Sequence
  Synthetic
cgagcgcggcggcggcggg

SEQ ID NO: 15303 - RNA, 20 nt, Artificial Sequence
  Synthetic
gcgagcgcggcggcggcggg

SEQ ID NO: 15304 - RNA, 21 nt, Artificial Sequence
  Synthetic
agcgagcgcggcggcggcggg

SEQ ID NO: 15305 - RNA, 22 nt, Artificial Sequence
  Synthetic
gagcgagcgcggcggcggcggg

SEQ ID NO: 15306 - RNA, 23 nt, Artificial Sequence
  Synthetic
ggagcgagcgcggcggcggcggg

SEQ ID NO: 15307 - RNA, 24 nt, Artificial Sequence
  Synthetic
gggagcgagcgcggcggcggcggg

SEQ ID NO: 15308 - RNA, 18 nt, Artificial Sequence
  Synthetic
agcgcggcggcggcgggg

SEQ ID NO: 15309 - RNA, 19 nt, Artificial Sequence
  Synthetic
gagcgcggcggcggcgggg

SEQ ID NO: 15310 - RNA, 20 nt, Artificial Sequence
  Synthetic
cgagcgcggcggcggcgggg

SEQ ID NO: 15311 - RNA, 21 nt, Artificial Sequence
  Synthetic
gcgagcgcggcggcggcgggg

SEQ ID NO: 15312 - RNA, 22 nt, Artificial Sequence
  Synthetic
agcgagcgcggcggcggcgggg

SEQ ID NO: 15313 - RNA, 23 nt, Artificial Sequence
  Synthetic
gagcgagcgcggcggcggcgggg

SEQ ID NO: 15314 - RNA, 24 nt, Artificial Sequence
  Synthetic
ggagcgagcgcggcggcggcgggg

SEQ ID NO: 15315 - RNA, 18 nt, Artificial Sequence
  Synthetic
cguaagaaaauggggggg

SEQ ID NO: 15316 - RNA, 19 nt, Artificial Sequence
  Synthetic
ccguaagaaaauggggggg

SEQ ID NO: 15317 - RNA, 20 nt, Artificial Sequence
  Synthetic
accguaagaaaauggggggg

SEQ ID NO: 15318 - RNA, 21 nt, Artificial Sequence
  Synthetic
caccguaagaaaauggggggg

SEQ ID NO: 15319 - RNA, 22 nt, Artificial Sequence
  Synthetic
ucaccguaagaaaauggggggg

SEQ ID NO: 15320 - RNA, 23 nt, Artificial Sequence
  Synthetic
cucaccguaagaaaauggggggg

SEQ ID NO: 15321 - RNA, 24 nt, Artificial Sequence
  Synthetic
acucaccguaagaaaauggggggg

SEQ ID NO: 15322 - RNA, 18 nt, Artificial Sequence
  Synthetic
cacaugcaaaccuggggg

SEQ ID NO: 15323 - RNA, 19 nt, Artificial Sequence
  Synthetic
ucacaugcaaaccuggggg

SEQ ID NO: 15324 - RNA, 20 nt, Artificial Sequence
  Synthetic
cucacaugcaaaccuggggg

SEQ ID NO: 15325 - RNA, 21 nt, Artificial Sequence
  Synthetic
acucacaugcaaaccuggggg

SEQ ID NO: 15326 - RNA, 22 nt, Artificial Sequence
  Synthetic
aacucacaugcaaaccuggggg

SEQ ID NO: 15327 - RNA, 23 nt, Artificial Sequence
  Synthetic
caacucacaugcaaaccuggggg

SEQ ID NO: 15328 - RNA, 24 nt, Artificial Sequence
  Synthetic
acaacucacaugcaaaccuggggg

SEQ ID NO: 15329 - RNA, 18 nt, Artificial Sequence
  Synthetic
ucacaugcaaaccugggg

SEQ ID NO: 15330 - RNA, 19 nt, Artificial Sequence
  Synthetic
cucacaugcaaaccugggg

SEQ ID NO: 15331 - RNA, 20 nt, Artificial Sequence
  Synthetic
acucacaugcaaaccugggg

SEQ ID NO: 15332 - RNA, 21 nt, Artificial Sequence
  Synthetic
aacucacaugcaaaccugggg

SEQ ID NO: 15333 - RNA, 22 nt, Artificial Sequence
  Synthetic
caacucacaugcaaaccugggg

SEQ ID NO: 15334 - RNA, 23 nt, Artificial Sequence
  Synthetic
acaacucacaugcaaaccugggg

SEQ ID NO: 15335 - RNA, 24 nt, Artificial Sequence
  Synthetic
aacaacucacaugcaaaccugggg

SEQ ID NO: 15336 - RNA, 18 nt, Artificial Sequence
  Synthetic
gaguccgcgugugugggg

SEQ ID NO: 15337 - RNA, 19 nt, Artificial Sequence
  Synthetic
agaguccgcgugugugggg

SEQ ID NO: 15338 - RNA, 20 nt, Artificial Sequence
  Synthetic
uagaguccgcgugugugggg

SEQ ID NO: 15339 - RNA, 21 nt, Artificial Sequence
  Synthetic
uuagaguccgcgugugugggg

SEQ ID NO: 15340 - RNA, 22 nt, Artificial Sequence
  Synthetic
uuuagaguccgcgugugugggg

SEQ ID NO: 15341 - RNA, 23 nt, Artificial Sequence
  Synthetic
uuuuagaguccgcgugugugggg

SEQ ID NO: 15342 - RNA, 24 nt, Artificial Sequence
  Synthetic
auuuuagaguccgcgugugugggg

SEQ ID NO: 15343 - RNA, 18 nt, Artificial Sequence
  Synthetic
agaguccgcguguguggg

SEQ ID NO: 15344 - RNA, 19 nt, Artificial Sequence
  Synthetic
uagaguccgcguguguggg

SEQ ID NO: 15345 - RNA, 20 nt, Artificial Sequence
  Synthetic
uuagaguccgcguguguggg

SEQ ID NO: 15346 - RNA, 21 nt, Artificial Sequence
  Synthetic
uuuagaguccgcguguguggg

SEQ ID NO: 15347 - RNA, 22 nt, Artificial Sequence
  Synthetic
uuuuagaguccgcguguguggg

SEQ ID NO: 15348 - RNA, 23 nt, Artificial Sequence
  Synthetic
auuuuagaguccgcguguguggg

SEQ ID NO: 15349 - RNA, 24 nt, Artificial Sequence
  Synthetic
cauuuuagaguccgcguguguggg

SEQ ID NO: 15350 - RNA, 18 nt, Artificial Sequence
  Synthetic
ccugggggugggagcugg

SEQ ID NO: 15351 - RNA, 19 nt, Artificial Sequence
  Synthetic
accugggggugggagcugg

SEQ ID NO: 15352 - RNA, 20 nt, Artificial Sequence
  Synthetic
aaccugggggugggagcugg

SEQ ID NO: 15353 - RNA, 21 nt, Artificial Sequence
  Synthetic
aaaccugggggugggagcugg

SEQ ID NO: 15354 - RNA, 22 nt, Artificial Sequence
  Synthetic
caaaccugggggugggagcugg

SEQ ID NO: 15355 - RNA, 23 nt, Artificial Sequence
  Synthetic
gcaaaccugggggugggagcugg

SEQ ID NO: 15356 - RNA, 24 nt, Artificial Sequence
  Synthetic
ugcaaaccugggggugggagcugg

SEQ ID NO: 15357 - RNA, 18 nt, Artificial Sequence
  Synthetic
uagaguccgcgugugugg

SEQ ID NO: 15358 - RNA, 19 nt, Artificial Sequence
  Synthetic
uuagaguccgcgugugugg

SEQ ID NO: 15359 - RNA, 20 nt, Artificial Sequence
  Synthetic
uuuagaguccgcgugugugg

SEQ ID NO: 15360 - RNA, 21 nt, Artificial Sequence
  Synthetic
uuuuagaguccgcgugugugg

SEQ ID NO: 15361 - RNA, 22 nt, Artificial Sequence
  Synthetic
auuuuagaguccgcgugugugg

SEQ ID NO: 15362 - RNA, 23 nt, Artificial Sequence
  Synthetic
cauuuuagaguccgcgugugugg

SEQ ID NO: 15363 - RNA, 24 nt, Artificial Sequence
  Synthetic
ucauuuuagaguccgcgugugugg

SEQ ID NO: 15364 - RNA, 18 nt, Artificial Sequence
  Synthetic
acucaccguaagaaaaug

SEQ ID NO: 15365 - RNA, 19 nt, Artificial Sequence
  Synthetic
cacucaccguaagaaaaug

SEQ ID NO: 15366 - RNA, 20 nt, Artificial Sequence
  Synthetic
ccacucaccguaagaaaaug

SEQ ID NO: 15367 - RNA, 21 nt, Artificial Sequence
  Synthetic
cccacucaccguaagaaaaug

SEQ ID NO: 15368 - RNA, 22 nt, Artificial Sequence
  Synthetic
ucccacucaccguaagaaaaug

SEQ ID NO: 15369 - RNA, 23 nt, Artificial Sequence
  Synthetic
uucccacucaccguaagaaaaug

SEQ ID NO: 15370 - RNA, 24 nt, Artificial Sequence
  Synthetic
cuucccacucaccguaagaaaaug

SEQ ID NO: 15371 - RNA, 18 nt, Artificial Sequence
  Synthetic
agugagaaaguggcacug

SEQ ID NO: 15372 - RNA, 19 nt, Artificial Sequence
  Synthetic
uagugagaaaguggcacug

SEQ ID NO: 15373 - RNA, 20 nt, Artificial Sequence
  Synthetic
auagugagaaaguggcacug

SEQ ID NO: 15374 - RNA, 21 nt, Artificial Sequence
  Synthetic
aauagugagaaaguggcacug

SEQ ID NO: 15375 - RNA, 22 nt, Artificial Sequence
  Synthetic
caauagugagaaaguggcacug

SEQ ID NO: 15376 - RNA, 23 nt, Artificial Sequence
  Synthetic
acaauagugagaaaguggcacug

SEQ ID NO: 15377 - RNA, 24 nt, Artificial Sequence
  Synthetic
cacaauagugagaaaguggcacug

SEQ ID NO: 15378 - RNA, 18 nt, Artificial Sequence
  Synthetic
accugggggugggagcug

SEQ ID NO: 15379 - RNA, 19 nt, Artificial Sequence
  Synthetic
aaccugggggugggagcug

SEQ ID NO: 15380 - RNA, 20 nt, Artificial Sequence
  Synthetic
aaaccugggggugggagcug

SEQ ID NO: 15381 - RNA, 21 nt, Artificial Sequence
  Synthetic
caaaccugggggugggagcug

SEQ ID NO: 15382 - RNA, 22 nt, Artificial Sequence
  Synthetic
gcaaaccugggggugggagcug

SEQ ID NO: 15383 - RNA, 23 nt, Artificial Sequence
  Synthetic
ugcaaaccugggggugggagcug

SEQ ID NO: 15384 - RNA, 24 nt, Artificial Sequence
  Synthetic
augcaaaccugggggugggagcug

SEQ ID NO: 15385 - RNA, 18 nt, Artificial Sequence
  Synthetic
accuccccucgcccgcug

SEQ ID NO: 15386 - RNA, 19 nt, Artificial Sequence
  Synthetic
caccuccccucgcccgcug

SEQ ID NO: 15387 - RNA, 20 nt, Artificial Sequence
  Synthetic
ccaccuccccucgcccgcug

SEQ ID NO: 15388 - RNA, 21 nt, Artificial Sequence
  Synthetic
cccaccuccccucgcccgcug

SEQ ID NO: 15389 - RNA, 22 nt, Artificial Sequence
  Synthetic
ucccaccuccccucgcccgcug

SEQ ID NO: 15390 - RNA, 23 nt, Artificial Sequence
  Synthetic
cucccaccuccccucgcccgcug

SEQ ID NO: 15391 - RNA, 24 nt, Artificial Sequence
  Synthetic
ccucccaccuccccucgcccgcug

SEQ ID NO: 15392 - RNA, 18 nt, Artificial Sequence
  Synthetic
ugggggugggagcuggug

SEQ ID NO: 15393 - RNA, 19 nt, Artificial Sequence
  Synthetic
cugggggugggagcuggug

SEQ ID NO: 15394 - RNA, 20 nt, Artificial Sequence
  Synthetic
ccugggggugggagcuggug

SEQ ID NO: 15395 - RNA, 21 nt, Artificial Sequence
  Synthetic
accugggggugggagcuggug

SEQ ID NO: 15396 - RNA, 22 nt, Artificial Sequence
  Synthetic
aaccugggggugggagcuggug

SEQ ID NO: 15397 - RNA, 23 nt, Artificial Sequence
  Synthetic
aaaccugggggugggagcuggug

SEQ ID NO: 15398 - RNA, 24 nt, Artificial Sequence
  Synthetic
caaaccugggggugggagcuggug

SEQ ID NO: 15399 - RNA, 18 nt, Artificial Sequence
  Synthetic
uuuuagaguccgcgugug

SEQ ID NO: 15400 - RNA, 19 nt, Artificial Sequence
  Synthetic
auuuuagaguccgcgugug

SEQ ID NO: 15401 - RNA, 20 nt, Artificial Sequence
  Synthetic
cauuuuagaguccgcgugug

SEQ ID NO: 15402 - RNA, 21 nt, Artificial Sequence
  Synthetic
ucauuuuagaguccgcgugug

SEQ ID NO: 15403 - RNA, 22 nt, Artificial Sequence
  Synthetic
uucauuuuagaguccgcgugug

SEQ ID NO: 15404 - RNA, 23 nt, Artificial Sequence
  Synthetic
uuucauuuuagaguccgcgugug

SEQ ID NO: 15405 - RNA, 24 nt, Artificial Sequence
  Synthetic
cuuucauuuuagaguccgcgugug

SEQ ID NO: 15406 - RNA, 18 nt, Artificial Sequence
  Synthetic
uuagaguccgcgugugug

SEQ ID NO: 15407 - RNA, 19 nt, Artificial Sequence
  Synthetic
uuuagaguccgcgugugug

SEQ ID NO: 15408 - RNA, 20 nt, Artificial Sequence
  Synthetic
uuuuagaguccgcgugugug

SEQ ID NO: 15409 - RNA, 21 nt, Artificial Sequence
  Synthetic
auuuuagaguccgcgugugug

SEQ ID NO: 15410 - RNA, 22 nt, Artificial Sequence
  Synthetic
cauuuuagaguccgcgugugug

SEQ ID NO: 15411 - RNA, 23 nt, Artificial Sequence
  Synthetic
ucauuuuagaguccgcgugugug

SEQ ID NO: 15412 - RNA, 24 nt, Artificial Sequence
  Synthetic
uucauuuuagaguccgcgugugug

SEQ ID NO: 15413 - RNA, 18 nt, Artificial Sequence
  Synthetic
cacucaccguaagaaaau

SEQ ID NO: 15414 - RNA, 19 nt, Artificial Sequence
  Synthetic
ccacucaccguaagaaaau

SEQ ID NO: 15415 - RNA, 20 nt, Artificial Sequence
  Synthetic
cccacucaccguaagaaaau

SEQ ID NO: 15416 - RNA, 21 nt, Artificial Sequence
  Synthetic
ucccacucaccguaagaaaau

SEQ ID NO: 15417 - RNA, 22 nt, Artificial Sequence
  Synthetic
uucccacucaccguaagaaaau

SEQ ID NO: 15418 - RNA, 23 nt, Artificial Sequence
  Synthetic
cuucccacucaccguaagaaaau

SEQ ID NO: 15419 - RNA, 24 nt, Artificial Sequence
  Synthetic
gcuucccacucaccguaagaaaau

SEQ ID NO: 15420 - RNA, 18 nt, Artificial Sequence
  Synthetic
cgcugcggagcuguaacu

SEQ ID NO: 15421 - RNA, 19 nt, Artificial Sequence
  Synthetic
ccgcugcggagcuguaacu

SEQ ID NO: 15422 - RNA, 20 nt, Artificial Sequence
  Synthetic
cccgcugcggagcuguaacu

SEQ ID NO: 15423 - RNA, 21 nt, Artificial Sequence
  Synthetic
gcccgcugcggagcuguaacu

SEQ ID NO: 15424 - RNA, 22 nt, Artificial Sequence
  Synthetic
cgcccgcugcggagcuguaacu

SEQ ID NO: 15425 - RNA, 23 nt, Artificial Sequence
  Synthetic
ucgcccgcugcggagcuguaacu

SEQ ID NO: 15426 - RNA, 24 nt, Artificial Sequence
  Synthetic
cucgcccgcugcggagcuguaacu

SEQ ID NO: 15427 - RNA, 18 nt, Artificial Sequence
  Synthetic
uagugagaaaguggcacu

SEQ ID NO: 15428 - RNA, 19 nt, Artificial Sequence
  Synthetic
auagugagaaaguggcacu

SEQ ID NO: 15429 - RNA, 20 nt, Artificial Sequence
  Synthetic
aauagugagaaaguggcacu

SEQ ID NO: 15430 - RNA, 21 nt, Artificial Sequence
  Synthetic
caauagugagaaaguggcacu

SEQ ID NO: 15431 - RNA, 22 nt, Artificial Sequence
  Synthetic
acaauagugagaaaguggcacu

SEQ ID NO: 15432 - RNA, 23 nt, Artificial Sequence
  Synthetic
cacaauagugagaaaguggcacu

SEQ ID NO: 15433 - RNA, 24 nt, Artificial Sequence
  Synthetic
ccacaauagugagaaaguggcacu

SEQ ID NO: 15434 - RNA, 18 nt, Artificial Sequence
  Synthetic
cggucccuggcucggccu

SEQ ID NO: 15435 - RNA, 19 nt, Artificial Sequence
  Synthetic
ccggucccuggcucggccu

SEQ ID NO: 15436 - RNA, 20 nt, Artificial Sequence
  Synthetic
cccggucccuggcucggccu

SEQ ID NO: 15437 - RNA, 18 nt, Artificial Sequence
  Synthetic
caccuccccucgcccgcu

SEQ ID NO: 15438 - RNA, 19 nt, Artificial Sequence
  Synthetic
ccaccuccccucgcccgcu

SEQ ID NO: 15439 - RNA, 20 nt, Artificial Sequence
  Synthetic
cccaccuccccucgcccgcu

SEQ ID NO: 15440 - RNA, 21 nt, Artificial Sequence
  Synthetic
ucccaccuccccucgcccgcu

SEQ ID NO: 15441 - RNA, 22 nt, Artificial Sequence
  Synthetic
cucccaccuccccucgcccgcu

SEQ ID NO: 15442 - RNA, 23 nt, Artificial Sequence
  Synthetic
ccucccaccuccccucgcccgcu

SEQ ID NO: 15443 - RNA, 24 nt, Artificial Sequence
  Synthetic
cccucccaccuccccucgcccgcu

SEQ ID NO: 15444 - RNA, 18 nt, Artificial Sequence
  Synthetic
cgagcgcagccgcgggcu

SEQ ID NO: 15445 - RNA, 19 nt, Artificial Sequence
  Synthetic
ccgagcgcagccgcgggcu

SEQ ID NO: 15446 - RNA, 20 nt, Artificial Sequence
  Synthetic
cccgagcgcagccgcgggcu

SEQ ID NO: 15447 - RNA, 21 nt, Artificial Sequence
  Synthetic
ucccgagcgcagccgcgggcu

SEQ ID NO: 15448 - RNA, 22 nt, Artificial Sequence
  Synthetic
uucccgagcgcagccgcgggcu

SEQ ID NO: 15449 - RNA, 23 nt, Artificial Sequence
  Synthetic
uuucccgagcgcagccgcgggcu

SEQ ID NO: 15450 - RNA, 24 nt, Artificial Sequence
  Synthetic
guuucccgagcgcagccgcgggcu

SEQ ID NO: 15451 - RNA, 18 nt, Artificial Sequence
  Synthetic
cuccugaguccgcggagu

SEQ ID NO: 15452 - RNA, 19 nt, Artificial Sequence
  Synthetic
gcuccugaguccgcggagu

SEQ ID NO: 15453 - RNA, 20 nt, Artificial Sequence
  Synthetic
cgcuccugaguccgcggagu

SEQ ID NO: 15454 - RNA, 21 nt, Artificial Sequence
  Synthetic
gcgcuccugaguccgcggagu

SEQ ID NO: 15455 - RNA, 22 nt, Artificial Sequence
  Synthetic
ggcgcuccugaguccgcggagu

SEQ ID NO: 15456 - RNA, 23 nt, Artificial Sequence
  Synthetic
cggcgcuccugaguccgcggagu

SEQ ID NO: 15457 - RNA, 24 nt, Artificial Sequence
  Synthetic
ccggcgcuccugaguccgcggagu

SEQ ID NO: 15458 - RNA, 18 nt, Artificial Sequence
  Synthetic
agucauccccacaauagu

SEQ ID NO: 15459 - RNA, 19 nt, Artificial Sequence
  Synthetic
uagucauccccacaauagu

SEQ ID NO: 15460 - RNA, 20 nt, Artificial Sequence
  Synthetic
guagucauccccacaauagu

SEQ ID NO: 15461 - RNA, 21 nt, Artificial Sequence
  Synthetic
aguagucauccccacaauagu

SEQ ID NO: 15462 - RNA, 22 nt, Artificial Sequence
  Synthetic
aaguagucauccccacaauagu

SEQ ID NO: 15463 - RNA, 23 nt, Artificial Sequence
  Synthetic
aaaguagucauccccacaauagu

SEQ ID NO: 15464 - RNA, 24 nt, Artificial Sequence
  Synthetic
gaaaguagucauccccacaauagu

SEQ ID NO: 15465 - RNA, 18 nt, Artificial Sequence
  Synthetic
uugcuucccacucaccgu

SEQ ID NO: 15466 - RNA, 19 nt, Artificial Sequence
  Synthetic
guugcuucccacucaccgu

SEQ ID NO: 15467 - RNA, 20 nt, Artificial Sequence
  Synthetic
gguugcuucccacucaccgu

SEQ ID NO: 15468 - RNA, 21 nt, Artificial Sequence
  Synthetic
agguugcuucccacucaccgu

SEQ ID NO: 15469 - RNA, 22 nt, Artificial Sequence
  Synthetic
gagguugcuucccacucaccgu

SEQ ID NO: 15470 - RNA, 23 nt, Artificial Sequence
  Synthetic
ggagguugcuucccacucaccgu

SEQ ID NO: 15471 - RNA, 24 nt, Artificial Sequence
  Synthetic
gggagguugcuucccacucaccgu

SEQ ID NO: 15472 - RNA, 18 nt, Artificial Sequence
  Synthetic
ggggaagugggugugcgu

SEQ ID NO: 15473 - RNA, 19 nt, Artificial Sequence
  Synthetic
aggggaagugggugugcgu

SEQ ID NO: 15474 - RNA, 20 nt, Artificial Sequence
  Synthetic
gaggggaagugggugugcgu

SEQ ID NO: 15475 - RNA, 21 nt, Artificial Sequence
  Synthetic
ggaggggaagugggugugcgu

SEQ ID NO: 15476 - RNA, 22 nt, Artificial Sequence
  Synthetic
gggaggggaagugggugugcgu

SEQ ID NO: 15477 - RNA, 23 nt, Artificial Sequence
  Synthetic
ggggaggggaagugggugugcgu

SEQ ID NO: 15478 - RNA, 24 nt, Artificial Sequence
  Synthetic
cggggaggggaagugggugugcgu

SEQ ID NO: 15479 - RNA, 18 nt, Artificial Sequence
  Synthetic
guaagaaaaugggggggu

SEQ ID NO: 15480 - RNA, 19 nt, Artificial Sequence
  Synthetic
cguaagaaaaugggggggu

SEQ ID NO: 15481 - RNA, 20 nt, Artificial Sequence
  Synthetic
ccguaagaaaaugggggggu

SEQ ID NO: 15482 - RNA, 21 nt, Artificial Sequence
  Synthetic
accguaagaaaaugggggggu

SEQ ID NO: 15483 - RNA, 22 nt, Artificial Sequence
  Synthetic
caccguaagaaaaugggggggu

SEQ ID NO: 15484 - RNA, 23 nt, Artificial Sequence
  Synthetic
ucaccguaagaaaaugggggggu

SEQ ID NO: 15485 - RNA, 24 nt, Artificial Sequence
  Synthetic
cucaccguaagaaaaugggggggu

SEQ ID NO: 15486 - RNA, 18 nt, Artificial Sequence
  Synthetic
acaugcaaaccugggggu

SEQ ID NO: 15487 - RNA, 19 nt, Artificial Sequence
  Synthetic
cacaugcaaaccugggggu

SEQ ID NO: 15488 - RNA, 20 nt, Artificial Sequence
  Synthetic
ucacaugcaaaccugggggu

SEQ ID NO: 15489 - RNA, 21 nt, Artificial Sequence
  Synthetic
cucacaugcaaaccugggggu

SEQ ID NO: 15490 - RNA, 22 nt, Artificial Sequence
  Synthetic
acucacaugcaaaccugggggu

SEQ ID NO: 15491 - RNA, 23 nt, Artificial Sequence
  Synthetic
aacucacaugcaaaccugggggu

SEQ ID NO: 15492 - RNA, 24 nt, Artificial Sequence
  Synthetic
caacucacaugcaaaccugggggu

SEQ ID NO: 15493 - RNA, 18 nt, Artificial Sequence
  Synthetic
cugggggugggagcuggu

SEQ ID NO: 15494 - RNA, 19 nt, Artificial Sequence
  Synthetic
ccugggggugggagcuggu

SEQ ID NO: 15495 - RNA, 20 nt, Artificial Sequence
  Synthetic
accugggggugggagcuggu

SEQ ID NO: 15496 - RNA, 21 nt, Artificial Sequence
  Synthetic
aaccugggggugggagcuggu

SEQ ID NO: 15497 - RNA, 22 nt, Artificial Sequence
  Synthetic
aaaccugggggugggagcuggu

SEQ ID NO: 15498 - RNA, 23 nt, Artificial Sequence
  Synthetic
caaaccugggggugggagcuggu

SEQ ID NO: 15499 - RNA, 24 nt, Artificial Sequence
  Synthetic
gcaaaccugggggugggagcuggu

SEQ ID NO: 15500 - RNA, 18 nt, Artificial Sequence
  Synthetic
auuuuagaguccgcgugu

SEQ ID NO: 15501 - RNA, 19 nt, Artificial Sequence
  Synthetic
cauuuuagaguccgcgugu

SEQ ID NO: 15502 - RNA, 20 nt, Artificial Sequence
  Synthetic
ucauuuuagaguccgcgugu

SEQ ID NO: 15503 - RNA, 21 nt, Artificial Sequence
  Synthetic
uucauuuuagaguccgcgugu

SEQ ID NO: 15504 - RNA, 22 nt, Artificial Sequence
  Synthetic
uuucauuuuagaguccgcgugu

SEQ ID NO: 15505 - RNA, 23 nt, Artificial Sequence
  Synthetic
cuuucauuuuagaguccgcgugu

SEQ ID NO: 15506 - RNA, 24 nt, Artificial Sequence
  Synthetic
ucuuucauuuuagaguccgcgugu

SEQ ID NO: 15507 - RNA, 18 nt, Artificial Sequence
  Synthetic
gcguacggaggagggugu

SEQ ID NO: 15508 - RNA, 19 nt, Artificial Sequence
  Synthetic
ugcguacggaggagggugu

SEQ ID NO: 15509 - RNA, 20 nt, Artificial Sequence
  Synthetic
gugcguacggaggagggugu

SEQ ID NO: 15510 - RNA, 21 nt, Artificial Sequence
  Synthetic
ugugcguacggaggagggugu

SEQ ID NO: 15511 - RNA, 22 nt, Artificial Sequence
  Synthetic
gugugcguacggaggagggugu

SEQ ID NO: 15512 - RNA, 23 nt, Artificial Sequence
  Synthetic
ggugugcguacggaggagggugu

SEQ ID NO: 15513 - RNA, 24 nt, Artificial Sequence
  Synthetic
gggugugcguacggaggagggugu

SEQ ID NO: 15514 - RNA, 18 nt, Artificial Sequence
  Synthetic
uuuagaguccgcgugugu

SEQ ID NO: 15515 - RNA, 19 nt, Artificial Sequence
  Synthetic
uuuuagaguccgcgugugu

SEQ ID NO: 15516 - RNA, 20 nt, Artificial Sequence
  Synthetic
auuuuagaguccgcgugugu

SEQ ID NO: 15517 - RNA, 21 nt, Artificial Sequence
  Synthetic
cauuuuagaguccgcgugugu

SEQ ID NO: 15518 - RNA, 22 nt, Artificial Sequence
  Synthetic
ucauuuuagaguccgcgugugu

SEQ ID NO: 15519 - RNA, 23 nt, Artificial Sequence
  Synthetic
uucauuuuagaguccgcgugugu

SEQ ID NO: 15520 - RNA, 24 nt, Artificial Sequence
  Synthetic
uuucauuuuagaguccgcgugugu

SEQ ID NO: 15521 - RNA, 18 nt, Artificial Sequence
  Synthetic
gacuugggcgcugcccuu

SEQ ID NO: 15522 - RNA, 19 nt, Artificial Sequence
  Synthetic
agacuugggcgcugcccuu

SEQ ID NO: 15523 - RNA, 20 nt, Artificial Sequence
  Synthetic
gagacuugggcgcugcccuu

SEQ ID NO: 15524 - RNA, 21 nt, Artificial Sequence
  Synthetic
ggagacuugggcgcugcccuu

SEQ ID NO: 15525 - RNA, 22 nt, Artificial Sequence
  Synthetic
uggagacuugggcgcugcccuu

SEQ ID NO: 15526 - RNA, 23 nt, Artificial Sequence
  Synthetic
cuggagacuugggcgcugcccuu

SEQ ID NO: 15527 - RNA, 24 nt, Artificial Sequence
  Synthetic
ccuggagacuugggcgcugcccuu

SEQ ID NO: 15528 - RNA, 18 nt, Artificial Sequence
  Synthetic
ggucccuggcucggccuu

SEQ ID NO: 15529 - RNA, 19 nt, Artificial Sequence
  Synthetic
cggucccuggcucggccuu

SEQ ID NO: 15530 - RNA, 20 nt, Artificial Sequence
  Synthetic
ccggucccuggcucggccuu

SEQ ID NO: 15531 - RNA, 18 nt, Artificial Sequence
  Synthetic
aagaggugagacuggcuu

SEQ ID NO: 15532 - RNA, 19 nt, Artificial Sequence
  Synthetic
aaagaggugagacuggcuu

SEQ ID NO: 15533 - RNA, 20 nt, Artificial Sequence
  Synthetic
aaaagaggugagacuggcuu

SEQ ID NO: 15534 - RNA, 21 nt, Artificial Sequence
  Synthetic
gaaaagaggugagacuggcuu

SEQ ID NO: 15535 - RNA, 22 nt, Artificial Sequence
  Synthetic
agaaaagaggugagacuggcuu

SEQ ID NO: 15536 - RNA, 23 nt, Artificial Sequence
  Synthetic
gagaaaagaggugagacuggcuu

SEQ ID NO: 15537 - RNA, 24 nt, Artificial Sequence
  Synthetic
ggagaaaagaggugagacuggcuu

SEQ ID NO: 15538 - RNA, 18 nt, Artificial Sequence
  Synthetic
augaacaaugcuaagguu

SEQ ID NO: 15539 - RNA, 19 nt, Artificial Sequence
  Synthetic
aaugaacaaugcuaagguu

SEQ ID NO: 15540 - RNA, 20 nt, Artificial Sequence
  Synthetic
uaaugaacaaugcuaagguu

SEQ ID NO: 15541 - RNA, 21 nt, Artificial Sequence
  Synthetic
auaaugaacaaugcuaagguu

SEQ ID NO: 15542 - RNA, 22 nt, Artificial Sequence
  Synthetic
aauaaugaacaaugcuaagguu

SEQ ID NO: 15543 - RNA, 23 nt, Artificial Sequence
  Synthetic
aaauaaugaacaaugcuaagguu

SEQ ID NO: 15544 - RNA, 24 nt, Artificial Sequence
  Synthetic
aaaauaaugaacaaugcuaagguu

SEQ ID NO: 15545 - RNA, 18 nt, Artificial Sequence
  Synthetic
gccgcuuuauuucucuuu

SEQ ID NO: 15546 - RNA, 19 nt, Artificial Sequence
  Synthetic
cgccgcuuuauuucucuuu

SEQ ID NO: 15547 - RNA, 20 nt, Artificial Sequence
  Synthetic
ccgccgcuuuauuucucuuu

SEQ ID NO: 15548 - RNA, 21 nt, Artificial Sequence
  Synthetic
uccgccgcuuuauuucucuuu

SEQ ID NO: 15549 - RNA, 22 nt, Artificial Sequence
  Synthetic
uuccgccgcuuuauuucucuuu

SEQ ID NO: 15550 - RNA, 23 nt, Artificial Sequence
  Synthetic
uuuccgccgcuuuauuucucuuu

SEQ ID NO: 15551 - RNA, 24 nt, Artificial Sequence
  Synthetic
cuuuccgccgcuuuauuucucuuu

SEQ ID NO: 15552 - RNA, 17 nt, Artificial Sequence
  Synthetic
acacaccccucucuccc

SEQ ID NO: 15553 - RNA, 17 nt, Artificial Sequence
  Synthetic
cuuacgcgagaauuccc

SEQ ID NO: 15554 - RNA, 17 nt, Artificial Sequence
  Synthetic
cccucucucccccucgc

SEQ ID NO: 15555 - RNA, 17 nt, Artificial Sequence
  Synthetic
ucuaguccugcgcgcuc

SEQ ID NO: 15556 - RNA, 17 nt, Artificial Sequence
  Synthetic
uugaacuugcagcucag

SEQ ID NO: 15557 - RNA, 17 nt, Artificial Sequence
  Synthetic
uuaagugcugggguuug

SEQ ID NO: 15558 - RNA, 17 nt, Artificial Sequence
  Synthetic
cacgcggacucuaaaau

SEQ ID NO: 15559 - RNA, 17 nt, Artificial Sequence
  Synthetic
aauugugggagagccgu

SEQ ID NO: 15560 - RNA, 17 nt, Artificial Sequence
  Synthetic
gauguguguccauuggu

SEQ ID NO: 15561 - RNA, 20 nt, Artificial Sequence
  Synthetic
ugcacacaccccucucuccc

SEQ ID NO: 15562 - RNA, 20 nt, Artificial Sequence
  Synthetic
uuacuuacgcgagaauuccc

SEQ ID NO: 15563 - RNA, 20 nt, Artificial Sequence
  Synthetic
caccccucucucccccucgc

SEQ ID NO: 15564 - RNA, 20 nt, Artificial Sequence
  Synthetic
gcuucuaguccugcgcgcuc

SEQ ID NO: 15565 - RNA, 20 nt, Artificial Sequence
  Synthetic
cacuugaacuugcagcucag

SEQ ID NO: 15566 - RNA, 20 nt, Artificial Sequence
  Synthetic
ugcuuaagugcugggguuug

SEQ ID NO: 15567 - RNA, 20 nt, Artificial Sequence
  Synthetic
augaauugugggagagccgu

SEQ ID NO: 15568 - RNA, 20 nt, Artificial Sequence
  Synthetic
ccugauguguguccauuggu

SEQ ID NO: 15569 - RNA, 17 nt, Artificial Sequence
  Synthetic
cccuccccgcacuggcc

SEQ ID NO: 15570 - RNA, 17 nt, Artificial Sequence
  Synthetic
uuuuuuuuuuuuuuuuu

SEQ ID NO: 15571 - RNA, 20 nt, Artificial Sequence
  Synthetic
ucccccuccccgcacuggcc

SEQ ID NO: 15572 - RNA, 20 nt, Artificial Sequence
  Synthetic
acacacgcggacucuaaaau

SEQ ID NO: 15573 - RNA, 20 nt, Artificial Sequence
  Synthetic
uuuuuuuuuuuuuuuuuuuu

SEQ ID NO: 15574 - RNA, 17 nt, Artificial Sequence
  Synthetic
gugaguacaagucuaaa

SEQ ID NO: 15575 - RNA, 17 nt, Artificial Sequence
  Synthetic
gcugguggggaaaggga

SEQ ID NO: 15576 - RNA, 17 nt, Artificial Sequence
  Synthetic
guccgggagcaacucua

SEQ ID NO: 15577 - RNA, 17 nt, Artificial Sequence
  Synthetic
ccuuuugugccggcucc

SEQ ID NO: 15578 - RNA, 17 nt, Artificial Sequence
  Synthetic
accuggcuucccuccgc

SEQ ID NO: 15579 - RNA, 17 nt, Artificial Sequence
  Synthetic
gcucagcucucaacuuc

SEQ ID NO: 15580 - RNA, 17 nt, Artificial Sequence
  Synthetic
uccucuuuccuccuuuc

SEQ ID NO: 15581 - RNA, 17 nt, Artificial Sequence
  Synthetic
gggagaaaagaggugag

SEQ ID NO: 15582 - RNA, 17 nt, Artificial Sequence
  Synthetic
cagcccuccaaacuuag

SEQ ID NO: 15583 - RNA, 17 nt, Artificial Sequence
  Synthetic
cuuuucgaaaaggaaug

SEQ ID NO: 15584 - RNA, 17 nt, Artificial Sequence
  Synthetic
cacgcggacucuaaaau

SEQ ID NO: 15585 - RNA, 17 nt, Artificial Sequence
  Synthetic
gagcgcagccgcgggcu

SEQ ID NO: 15586 - RNA, 20 nt, Artificial Sequence
  Synthetic
ggagugaguacaagucuaaa

SEQ ID NO: 15587 - RNA, 20 nt, Artificial Sequence
  Synthetic
ggagcugguggggaaaggga

SEQ ID NO: 15588 - RNA, 20 nt, Artificial Sequence
  Synthetic
gguguccgggagcaacucua

SEQ ID NO: 15589 - RNA, 20 nt, Artificial Sequence
  Synthetic
cugccuuuugugccggcucc

SEQ ID NO: 15590 - RNA, 20 nt, Artificial Sequence
  Synthetic
ucuaccuggcuucccuccgc

SEQ ID NO: 15591 - RNA, 20 nt, Artificial Sequence
  Synthetic
gaggcucagcucucaacuuc

SEQ ID NO: 15592 - RNA, 20 nt, Artificial Sequence
  Synthetic
uccuccucuuuccuccuuuc

SEQ ID NO: 15593 - RNA, 20 nt, Artificial Sequence
  Synthetic
ccggggagaaaagaggugag

SEQ ID NO: 15594 - RNA, 20 nt, Artificial Sequence
  Synthetic
ccgcagcccuccaaacuuag

SEQ ID NO: 15595 - RNA, 20 nt, Artificial Sequence
  Synthetic
ucucuuuucgaaaaggaaug

SEQ ID NO: 15596 - RNA, 20 nt, Artificial Sequence
  Synthetic
acacacgcggacucuaaaau

SEQ ID NO: 15597 - RNA, 20 nt, Artificial Sequence
  Synthetic
cccgagcgcagccgcgggcu

SEQ ID NO: 15598 - RNA, 17 nt, Artificial Sequence
  Synthetic
gcacuaggugaaaucuc

SEQ ID NO: 15599 - RNA, 17 nt, Artificial Sequence
  Synthetic
gaaagcaguguaaggcu

SEQ ID NO: 15600 - RNA, 20 nt, Artificial Sequence
  Synthetic
guaauuaagaaagcagugua

SEQ ID NO: 15601 - RNA, 20 nt, Artificial Sequence
  Synthetic
guugcacuaggugaaaucuc

SEQ ID NO: 15602 - RNA, 20 nt, Artificial Sequence
  Synthetic
ggcuguuuuggaauguagag

SEQ ID NO: 15603 - RNA, 17 nt, Artificial Sequence
  Synthetic
ggcuguuuuuggaucuu

SEQ ID NO: 15604 - RNA, 20 nt, Artificial Sequence
  Synthetic
gugcuacuuauacaauucac

SEQ ID NO: 15605 - RNA, 20 nt, Artificial Sequence
  Synthetic
gaaaauacuuacuguacugc

SEQ ID NO: 15606 - RNA, 17 nt, Artificial Sequence
  Synthetic
auuaagaaagcagugua

SEQ ID NO: 15607 - RNA, 17 nt, Artificial Sequence
  Synthetic
auuuuacuagugaauua

SEQ ID NO: 15608 - RNA, 17 nt, Artificial Sequence
  Synthetic
auuuaagacgggaaaac

SEQ ID NO: 15609 - RNA, 17 nt, Artificial Sequence
  Synthetic
agaaagcaguguaaggc

SEQ ID NO: 15610 - RNA, 17 nt, Artificial Sequence
  Synthetic
uguuuuggaauguagag

SEQ ID NO: 15611 - RNA, 17 nt, Artificial Sequence
  Synthetic
acaacuuguguugcacu

SEQ ID NO: 15612 - RNA, 20 nt, Artificial Sequence
  Synthetic
ucucacauaaaaauuuaaga

SEQ ID NO: 15613 - RNA, 20 nt, Artificial Sequence
  Synthetic
uuggaauguagagaggcaga

SEQ ID NO: 15614 - RNA, 20 nt, Artificial Sequence
  Synthetic
auuauuuuacuagugaauua

SEQ ID NO: 15615 - RNA, 20 nt, Artificial Sequence
  Synthetic
aaaauuuaagacgggaaaac

SEQ ID NO: 15616 - RNA, 20 nt, Artificial Sequence
  Synthetic
cucacauaaaaauuuaagac

SEQ ID NO: 15617 - RNA, 20 nt, Artificial Sequence
  Synthetic
uacacaacuuguguugcacu

SEQ ID NO: 15618 - RNA, 20 nt, Artificial Sequence
  Synthetic
uaagaaagcaguguaaggcu

SEQ ID NO: 15619 - RNA, 20 nt, Artificial Sequence
  Synthetic
auuagaauaaaaggcuguuu

SEQ ID NO: 15620 - RNA, 17 nt, Artificial Sequence
  Synthetic
uauuuacagccauaaca

SEQ ID NO: 15621 - RNA, 17 nt, Artificial Sequence
  Synthetic
auacuuacuguacugca

SEQ ID NO: 15622 - RNA, 17 nt, Artificial Sequence
  Synthetic
cacuggaaacccuguua

SEQ ID NO: 15623 - RNA, 17 nt, Artificial Sequence
  Synthetic
cuauuuacagccauaac

SEQ ID NO: 15624 - RNA, 17 nt, Artificial Sequence
  Synthetic
cuacuuauacaauucac

SEQ ID NO: 15625 - RNA, 17 nt, Artificial Sequence
  Synthetic
aauacuuacuguacugc

SEQ ID NO: 15626 - RNA, 17 nt, Artificial Sequence
  Synthetic
uacuuacuguacugcag

SEQ ID NO: 15627 - RNA, 17 nt, Artificial Sequence
  Synthetic
uguacugcaggggaauu

SEQ ID NO: 15628 - RNA, 17 nt, Artificial Sequence
  Synthetic
uggguagcaguggcuuu

SEQ ID NO: 15629 - RNA, 17 nt, Artificial Sequence
  Synthetic
uggcuuuaggcuguuuu

SEQ ID NO: 15630 - RNA, 20 nt, Artificial Sequence
  Synthetic
aacuauuuacagccauaaca

SEQ ID NO: 15631 - RNA, 20 nt, Artificial Sequence
  Synthetic
aaaauacuuacuguacugca

SEQ ID NO: 15632 - RNA, 20 nt, Artificial Sequence
  Synthetic
auucacuggaaacccuguua

SEQ ID NO: 15633 - RNA, 20 nt, Artificial Sequence
  Synthetic
aaacuauuuacagccauaac

SEQ ID NO: 15634 - RNA, 20 nt, Artificial Sequence
  Synthetic
aaauacuuacuguacugcag

SEQ ID NO: 15635 - RNA, 20 nt, Artificial Sequence
  Synthetic
uacuguacugcaggggaauu

SEQ ID NO: 15636 - RNA, 20 nt, Artificial Sequence
  Synthetic
uuaggcuguuuuuggaucuu

SEQ ID NO: 15637 - RNA, 20 nt, Artificial Sequence
  Synthetic
caguggcuuuaggcuguuuu

SEQ ID NO: 15638 - RNA, 17 nt, Artificial Sequence
  Synthetic
gaauguagagaggcaga

SEQ ID NO: 15639 - RNA, 17 nt, Artificial Sequence
  Synthetic
ggaauguagagaggcag

SEQ ID NO: 15640 - RNA, 17 nt, Artificial Sequence
  Synthetic
guauuuucuuucauugg

SEQ ID NO: 15641 - RNA, 20 nt, Artificial Sequence
  Synthetic
guaaguauuuucuuucauug

SEQ ID NO: 15642 - RNA, 17 nt, Artificial Sequence
  Synthetic
aaaauaauuagaauaaa

SEQ ID NO: 15643 - RNA, 17 nt, Artificial Sequence
  Synthetic
cacauaaaaauuuaaga

SEQ ID NO: 15644 - RNA, 17 nt, Artificial Sequence
  Synthetic
acauaaaaauuuaagac

SEQ ID NO: 15645 - RNA, 17 nt, Artificial Sequence
  Synthetic
uguaaggcugggcgcag

SEQ ID NO: 15646 - RNA, 17 nt, Artificial Sequence
  Synthetic
aauguagagaggcagag

SEQ ID NO: 15647 - RNA, 17 nt, Artificial Sequence
  Synthetic
agaauaaaaggcuguuu

SEQ ID NO: 15648 - RNA, 20 nt, Artificial Sequence
  Synthetic
aguaaaauaauuagaauaaa

SEQ ID NO: 15649 - RNA, 20 nt, Artificial Sequence
  Synthetic
uuaagaaagcaguguaaggc

SEQ ID NO: 15650 - RNA, 20 nt, Artificial Sequence
  Synthetic
caguguaaggcugggcgcag

SEQ ID NO: 15651 - RNA, 20 nt, Artificial Sequence
  Synthetic
uuuggaauguagagaggcag

SEQ ID NO: 15652 - RNA, 20 nt, Artificial Sequence
  Synthetic
uggaauguagagaggcagag

SEQ ID NO: 15653 - RNA, 17 nt, Artificial Sequence
  Synthetic
aguauuuucuuucauug

SEQ ID NO: 15654 - RNA, 17 nt, Artificial Sequence
  Synthetic
uaaguauuuucuuucau

SEQ ID NO: 15655 - RNA, 17 nt, Artificial Sequence
  Synthetic
aaguauuuucuuucauu

SEQ ID NO: 15656 - RNA, 20 nt, Artificial Sequence
  Synthetic
uaaguauuuucuuucauugg

SEQ ID NO: 15657 - RNA, 20 nt, Artificial Sequence
  Synthetic
caguaaguauuuucuuucau

SEQ ID NO: 15658 - RNA, 20 nt, Artificial Sequence
  Synthetic
aguaaguauuuucuuucauu

SEQ ID NO: 15659 - RNA, 18 nt, Artificial Sequence
  Synthetic
ggggcugauauaacuucu

SEQ ID NO: 15660 - RNA, 20 nt, Artificial Sequence
  Synthetic
gaggggcugauauaacuucu

SEQ ID NO: 15661 - RNA, 23 nt, Artificial Sequence
  Synthetic
gcagaggggcugauauaacuucu

SEQ ID NO: 15662 - RNA, 24 nt, Artificial Sequence
  Synthetic
ggcagaggggcugauauaacuucu

SEQ ID NO: 15663 - RNA, 21 nt, Artificial Sequence
  Synthetic
gcaaacuauuuacagccauaa

SEQ ID NO: 15664 - RNA, 24 nt, Artificial Sequence
  Synthetic
gaagcaaacuauuuacagccauaa

SEQ ID NO: 15665 - RNA, 18 nt, Artificial Sequence
  Synthetic
gccauaacaggguuucca

SEQ ID NO: 15666 - RNA, 19 nt, Artificial Sequence
  Synthetic
gugaauuguauaaguagca

SEQ ID NO: 15667 - RNA, 19 nt, Artificial Sequence
  Synthetic
gcaaaacuagaaaguuuua

SEQ ID NO: 15668 - RNA, 20 nt, Artificial Sequence
  Synthetic
gcaguggcuuuaggcuguuu

SEQ ID NO: 15669 - RNA, 23 nt, Artificial Sequence
  Synthetic
guagcaguggcuuuaggcuguuu

SEQ ID NO: 15670 - RNA, 24 nt, Artificial Sequence
  Synthetic
gguagcaguggcuuuaggcuguuu

SEQ ID NO: 15671 - RNA, 21 nt, Artificial Sequence
  Synthetic
uuuauucuaauuauuuuacua

SEQ ID NO: 15672 - RNA, 22 nt, Artificial Sequence
  Synthetic
uuuuauucuaauuauuuuacua

SEQ ID NO: 15673 - RNA, 23 nt, Artificial Sequence
  Synthetic
cuuuuauucuaauuauuuuacua

SEQ ID NO: 15674 - RNA, 24 nt, Artificial Sequence
  Synthetic
ccuuuuauucuaauuauuuuacua

SEQ ID NO: 15675 - RNA, 18 nt, Artificial Sequence
  Synthetic
uauuuuacuagugaauua

SEQ ID NO: 15676 - RNA, 19 nt, Artificial Sequence
  Synthetic
uuauuuuacuagugaauua

SEQ ID NO: 15677 - RNA, 20 nt, Artificial Sequence
  Synthetic
auuauuuuacuagugaauua

SEQ ID NO: 15678 - RNA, 21 nt, Artificial Sequence
  Synthetic
aauuauuuuacuagugaauua

SEQ ID NO: 15679 - RNA, 22 nt, Artificial Sequence
  Synthetic
uaauuauuuuacuagugaauua

SEQ ID NO: 15680 - RNA, 23 nt, Artificial Sequence
  Synthetic
cuaauuauuuuacuagugaauua

SEQ ID NO: 15681 - RNA, 24 nt, Artificial Sequence
  Synthetic
ucuaauuauuuuacuagugaauua

SEQ ID NO: 15682 - RNA, 18 nt, Artificial Sequence
  Synthetic
auucacuaguaaaauaau

SEQ ID NO: 15683 - RNA, 19 nt, Artificial Sequence
  Synthetic
aauucacuaguaaaauaau

SEQ ID NO: 15684 - RNA, 20 nt, Artificial Sequence
  Synthetic
uaauucacuaguaaaauaau

SEQ ID NO: 15685 - RNA, 19 nt, Artificial Sequence
  Synthetic
aggggcugauauaacuucu

SEQ ID NO: 15686 - RNA, 21 nt, Artificial Sequence
  Synthetic
agaggggcugauauaacuucu

SEQ ID NO: 15687 - RNA, 22 nt, Artificial Sequence
  Synthetic
cagaggggcugauauaacuucu

SEQ ID NO: 15688 - RNA, 18 nt, Artificial Sequence
  Synthetic
uagaauaaaaggcuguuu

SEQ ID NO: 15689 - RNA, 19 nt, Artificial Sequence
  Synthetic
uuagaauaaaaggcuguuu

SEQ ID NO: 15690 - RNA, 20 nt, Artificial Sequence
  Synthetic
auuagaauaaaaggcuguuu

SEQ ID NO: 15691 - RNA, 21 nt, Artificial Sequence
  Synthetic
aauuagaauaaaaggcuguuu

SEQ ID NO: 15692 - RNA, 22 nt, Artificial Sequence
  Synthetic
uaauuagaauaaaaggcuguuu

SEQ ID NO: 15693 - RNA, 23 nt, Artificial Sequence
  Synthetic
auaauuagaauaaaaggcuguuu

SEQ ID NO: 15694 - RNA, 24 nt, Artificial Sequence
  Synthetic
aauaauuagaauaaaaggcuguuu

SEQ ID NO: 15695 - RNA, 18 nt, Artificial Sequence
  Synthetic
auacuuacuguacugcag

SEQ ID NO: 15696 - RNA, 19 nt, Artificial Sequence
  Synthetic
aauacuuacuguacugcag

SEQ ID NO: 15697 - RNA, 20 nt, Artificial Sequence
  Synthetic
aaauacuuacuguacugcag

SEQ ID NO: 15698 - RNA, 18 nt, Artificial Sequence
  Synthetic
aacuauuuacagccauaa

SEQ ID NO: 15699 - RNA, 19 nt, Artificial Sequence
  Synthetic
aaacuauuuacagccauaa

SEQ ID NO: 15700 - RNA, 20 nt, Artificial Sequence
  Synthetic
caaacuauuuacagccauaa

SEQ ID NO: 15701 - RNA, 22 nt, Artificial Sequence
  Synthetic
agcaaacuauuuacagccauaa

SEQ ID NO: 15702 - RNA, 23 nt, Artificial Sequence
  Synthetic
aagcaaacuauuuacagccauaa

SEQ ID NO: 15703 - RNA, 19 nt, Artificial Sequence
  Synthetic
agccauaacaggguuucca

SEQ ID NO: 15704 - RNA, 20 nt, Artificial Sequence
  Synthetic
cagccauaacaggguuucca

SEQ ID NO: 15705 - RNA, 21 nt, Artificial Sequence
  Synthetic
acagccauaacaggguuucca

SEQ ID NO: 15706 - RNA, 22 nt, Artificial Sequence
  Synthetic
uacagccauaacaggguuucca

SEQ ID NO: 15707 - RNA, 23 nt, Artificial Sequence
  Synthetic
uuacagccauaacaggguuucca

SEQ ID NO: 15708 - RNA, 24 nt, Artificial Sequence
  Synthetic
uuuacagccauaacaggguuucca

SEQ ID NO: 15709 - RNA, 18 nt, Artificial Sequence
  Synthetic
ugaauuguauaaguagca

SEQ ID NO: 15710 - RNA, 20 nt, Artificial Sequence
  Synthetic
agugaauuguauaaguagca

SEQ ID NO: 15711 - RNA, 21 nt, Artificial Sequence
  Synthetic
cagugaauuguauaaguagca

SEQ ID NO: 15712 - RNA, 22 nt, Artificial Sequence
  Synthetic
ccagugaauuguauaaguagca

SEQ ID NO: 15713 - RNA, 23 nt, Artificial Sequence
  Synthetic
uccagugaauuguauaaguagca

SEQ ID NO: 15714 - RNA, 24 nt, Artificial Sequence
  Synthetic
uuccagugaauuguauaaguagca

SEQ ID NO: 15715 - RNA, 18 nt, Artificial Sequence
  Synthetic
caaaacuagaaaguuuua

SEQ ID NO: 15716 - RNA, 20 nt, Artificial Sequence
  Synthetic
agcaaaacuagaaaguuuua

SEQ ID NO: 15717 - RNA, 18 nt, Artificial Sequence
  Synthetic
aguggcuuuaggcuguuu

SEQ ID NO: 15718 - RNA, 19 nt, Artificial Sequence
  Synthetic
caguggcuuuaggcuguuu

SEQ ID NO: 15719 - RNA, 21 nt, Artificial Sequence
  Synthetic
agcaguggcuuuaggcuguuu

SEQ ID NO: 15720 - RNA, 22 nt, Artificial Sequence
  Synthetic
uagcaguggcuuuaggcuguuu

SEQ ID NO: 15721 - RNA, 22 nt, Artificial Sequence
  Synthetic
gaaaauacuuacuguacugcag

SEQ ID NO: 15722 - RNA, 24 nt, Artificial Sequence
  Synthetic
guuaagcaaaacuagaaaguuuua

SEQ ID NO: 15723 - RNA, 18 nt, Artificial Sequence
  Synthetic
auucuaauuauuuuacua

SEQ ID NO: 15724 - RNA, 19 nt, Artificial Sequence
  Synthetic
uauucuaauuauuuuacua

SEQ ID NO: 15725 - RNA, 20 nt, Artificial Sequence
  Synthetic
uuauucuaauuauuuuacua

SEQ ID NO: 15726 - RNA, 21 nt, Artificial Sequence
  Synthetic
auaauucacuaguaaaauaau

SEQ ID NO: 15727 - RNA, 22 nt, Artificial Sequence
  Synthetic
cauaauucacuaguaaaauaau

SEQ ID NO: 15728 - RNA, 23 nt, Artificial Sequence
  Synthetic
ccauaauucacuaguaaaauaau

SEQ ID NO: 15729 - RNA, 24 nt, Artificial Sequence
  Synthetic
uccauaauucacuaguaaaauaau

SEQ ID NO: 15730 - RNA, 21 nt, Artificial Sequence
  Synthetic
aaaauacuuacuguacugcag

SEQ ID NO: 15731 - RNA, 23 nt, Artificial Sequence
  Synthetic
agaaaauacuuacuguacugcag

SEQ ID NO: 15732 - RNA, 24 nt, Artificial Sequence
  Synthetic
aagaaaauacuuacuguacugcag

SEQ ID NO: 15733 - RNA, 21 nt, Artificial Sequence
  Synthetic
aagcaaaacuagaaaguuuua

SEQ ID NO: 15734 - RNA, 22 nt, Artificial Sequence
  Synthetic
uaagcaaaacuagaaaguuuua

SEQ ID NO: 15735 - RNA, 23 nt, Artificial Sequence
  Synthetic
uuaagcaaaacuagaaaguuuua

SEQ ID NO: 15736 - RNA, 18 nt, Artificial Sequence
  Synthetic
aaauuuaagacgggaaaa

SEQ ID NO: 15737 - RNA, 19 nt, Artificial Sequence
  Synthetic
aaaauuuaagacgggaaaa

SEQ ID NO: 15738 - RNA, 20 nt, Artificial Sequence
  Synthetic
aaaaauuuaagacgggaaaa

SEQ ID NO: 15739 - RNA, 21 nt, Artificial Sequence
  Synthetic
uaaaaauuuaagacgggaaaa

SEQ ID NO: 15740 - RNA, 22 nt, Artificial Sequence
  Synthetic
auaaaaauuuaagacgggaaaa

SEQ ID NO: 15741 - RNA, 23 nt, Artificial Sequence
  Synthetic
cauaaaaauuuaagacgggaaaa

SEQ ID NO: 15742 - RNA, 24 nt, Artificial Sequence
  Synthetic
acauaaaaauuuaagacgggaaaa

SEQ ID NO: 15743 - RNA, 18 nt, Artificial Sequence
  Synthetic
ucacauaaaaauuuaaga

SEQ ID NO: 15744 - RNA, 19 nt, Artificial Sequence
  Synthetic
cucacauaaaaauuuaaga

SEQ ID NO: 15745 - RNA, 20 nt, Artificial Sequence
  Synthetic
ucucacauaaaaauuuaaga

SEQ ID NO: 15746 - RNA, 21 nt, Artificial Sequence
  Synthetic
aucucacauaaaaauuuaaga

SEQ ID NO: 15747 - RNA, 22 nt, Artificial Sequence
  Synthetic
caucucacauaaaaauuuaaga

SEQ ID NO: 15748 - RNA, 23 nt, Artificial Sequence
  Synthetic
ucaucucacauaaaaauuuaaga

SEQ ID NO: 15749 - RNA, 24 nt, Artificial Sequence
  Synthetic
cucaucucacauaaaaauuuaaga

SEQ ID NO: 15750 - RNA, 18 nt, Artificial Sequence
  Synthetic
aauuuaagacgggaaaac

SEQ ID NO: 15751 - RNA, 19 nt, Artificial Sequence
  Synthetic
aaauuuaagacgggaaaac

SEQ ID NO: 15752 - RNA, 20 nt, Artificial Sequence
  Synthetic
aaaauuuaagacgggaaaac

SEQ ID NO: 15753 - RNA, 21 nt, Artificial Sequence
  Synthetic
aaaaauuuaagacgggaaaac

SEQ ID NO: 15754 - RNA, 22 nt, Artificial Sequence
  Synthetic
uaaaaauuuaagacgggaaaac

SEQ ID NO: 15755 - RNA, 23 nt, Artificial Sequence
  Synthetic
auaaaaauuuaagacgggaaaac

SEQ ID NO: 15756 - RNA, 24 nt, Artificial Sequence
  Synthetic
cauaaaaauuuaagacgggaaaac

SEQ ID NO: 15757 - RNA, 18 nt, Artificial Sequence
  Synthetic
cacauaaaaauuuaagac

SEQ ID NO: 15758 - RNA, 19 nt, Artificial Sequence
  Synthetic
ucacauaaaaauuuaagac

SEQ ID NO: 15759 - RNA, 20 nt, Artificial Sequence
  Synthetic
cucacauaaaaauuuaagac

SEQ ID NO: 15760 - RNA, 21 nt, Artificial Sequence
  Synthetic
ucucacauaaaaauuuaagac

SEQ ID NO: 15761 - RNA, 22 nt, Artificial Sequence
  Synthetic
aucucacauaaaaauuuaagac

SEQ ID NO: 15762 - RNA, 23 nt, Artificial Sequence
  Synthetic
caucucacauaaaaauuuaagac

SEQ ID NO: 15763 - RNA, 24 nt, Artificial Sequence
  Synthetic
ucaucucacauaaaaauuuaagac

SEQ ID NO: 15764 - RNA, 18 nt, Artificial Sequence
  Synthetic
cucacauaaaaauuuaag

SEQ ID NO: 15765 - RNA, 19 nt, Artificial Sequence
  Synthetic
ucucacauaaaaauuuaag

SEQ ID NO: 15766 - RNA, 20 nt, Artificial Sequence
  Synthetic
aucucacauaaaaauuuaag

SEQ ID NO: 15767 - RNA, 21 nt, Artificial Sequence
  Synthetic
caucucacauaaaaauuuaag

SEQ ID NO: 15768 - RNA, 22 nt, Artificial Sequence
  Synthetic
ucaucucacauaaaaauuuaag

SEQ ID NO: 15769 - RNA, 23 nt, Artificial Sequence
  Synthetic
cucaucucacauaaaaauuuaag

SEQ ID NO: 15770 - RNA, 24 nt, Artificial Sequence
  Synthetic
gcucaucucacauaaaaauuuaag

SEQ ID NO: 15771 - RNA, 18 nt, Artificial Sequence
  Synthetic
caacuuguguugcacuag

SEQ ID NO: 15772 - RNA, 19 nt, Artificial Sequence
  Synthetic
acaacuuguguugcacuag

SEQ ID NO: 15773 - RNA, 20 nt, Artificial Sequence
  Synthetic
cacaacuuguguugcacuag

SEQ ID NO: 15774 - RNA, 21 nt, Artificial Sequence
  Synthetic
acacaacuuguguugcacuag

SEQ ID NO: 15775 - RNA, 22 nt, Artificial Sequence
  Synthetic
uacacaacuuguguugcacuag

SEQ ID NO: 15776 - RNA, 23 nt, Artificial Sequence
  Synthetic
cuacacaacuuguguugcacuag

SEQ ID NO: 15777 - RNA, 24 nt, Artificial Sequence
  Synthetic
ucuacacaacuuguguugcacuag

SEQ ID NO: 15778 - RNA, 18 nt, Artificial Sequence
  Synthetic
aacaggaagaugcauucu

SEQ ID NO: 15779 - RNA, 19 nt, Artificial Sequence
  Synthetic
aaacaggaagaugcauucu

SEQ ID NO: 15780 - RNA, 20 nt, Artificial Sequence
  Synthetic
aaaacaggaagaugcauucu

SEQ ID NO: 15781 - RNA, 21 nt, Artificial Sequence
  Synthetic
gaaaacaggaagaugcauucu

SEQ ID NO: 15782 - RNA, 22 nt, Artificial Sequence
  Synthetic
ggaaaacaggaagaugcauucu

SEQ ID NO: 15783 - RNA, 23 nt, Artificial Sequence
  Synthetic
gggaaaacaggaagaugcauucu

SEQ ID NO: 15784 - RNA, 24 nt, Artificial Sequence
  Synthetic
cgggaaaacaggaagaugcauucu

SEQ ID NO: 15785 - RNA, 18 nt, Artificial Sequence
  Synthetic
uuauuuuacuagugaauu

SEQ ID NO: 15786 - RNA, 19 nt, Artificial Sequence
  Synthetic
auuauuuuacuagugaauu

SEQ ID NO: 15787 - RNA, 20 nt, Artificial Sequence
  Synthetic
aauuauuuuacuagugaauu

SEQ ID NO: 15788 - RNA, 21 nt, Artificial Sequence
  Synthetic
uaauuauuuuacuagugaauu

SEQ ID NO: 15789 - RNA, 22 nt, Artificial Sequence
  Synthetic
cuaauuauuuuacuagugaauu

SEQ ID NO: 15790 - RNA, 23 nt, Artificial Sequence
  Synthetic
ucuaauuauuuuacuagugaauu

SEQ ID NO: 15791 - RNA, 24 nt, Artificial Sequence
  Synthetic
uucuaauuauuuuacuagugaauu

SEQ ID NO: 15792 - RNA, 18 nt, Artificial Sequence
  Synthetic
aaaacaggaagaugcauu

SEQ ID NO: 15793 - RNA, 19 nt, Artificial Sequence
  Synthetic
gaaaacaggaagaugcauu

SEQ ID NO: 15794 - RNA, 20 nt, Artificial Sequence
  Synthetic
ggaaaacaggaagaugcauu

SEQ ID NO: 15795 - RNA, 21 nt, Artificial Sequence
  Synthetic
gggaaaacaggaagaugcauu

SEQ ID NO: 15796 - RNA, 22 nt, Artificial Sequence
  Synthetic
cgggaaaacaggaagaugcauu

SEQ ID NO: 15797 - RNA, 23 nt, Artificial Sequence
  Synthetic
acgggaaaacaggaagaugcauu

SEQ ID NO: 15798 - RNA, 24 nt, Artificial Sequence
  Synthetic
gacgggaaaacaggaagaugcauu

SEQ ID NO: 15799 - RNA, 18 nt, Artificial Sequence
  Synthetic
uuggaauguagagaggca

SEQ ID NO: 15800 - RNA, 19 nt, Artificial Sequence
  Synthetic
uuuggaauguagagaggca

SEQ ID NO: 15801 - RNA, 20 nt, Artificial Sequence
  Synthetic
uuuuggaauguagagaggca

SEQ ID NO: 15802 - RNA, 21 nt, Artificial Sequence
  Synthetic
guuuuggaauguagagaggca

SEQ ID NO: 15803 - RNA, 22 nt, Artificial Sequence
  Synthetic
uguuuuggaauguagagaggca

SEQ ID NO: 15804 - RNA, 23 nt, Artificial Sequence
  Synthetic
cuguuuuggaauguagagaggca

SEQ ID NO: 15805 - RNA, 24 nt, Artificial Sequence
  Synthetic
gcuguuuuggaauguagagaggca

SEQ ID NO: 15806 - RNA, 18 nt, Artificial Sequence
  Synthetic
caacacaaguuguguaga

SEQ ID NO: 15807 - RNA, 19 nt, Artificial Sequence
  Synthetic
gcaacacaaguuguguaga

SEQ ID NO: 15808 - RNA, 20 nt, Artificial Sequence
  Synthetic
ugcaacacaaguuguguaga

SEQ ID NO: 15809 - RNA, 21 nt, Artificial Sequence
  Synthetic
gugcaacacaaguuguguaga

SEQ ID NO: 15810 - RNA, 22 nt, Artificial Sequence
  Synthetic
agugcaacacaaguuguguaga

SEQ ID NO: 15811 - RNA, 23 nt, Artificial Sequence
  Synthetic
uagugcaacacaaguuguguaga

SEQ ID NO: 15812 - RNA, 24 nt, Artificial Sequence
  Synthetic
cuagugcaacacaaguuguguaga

SEQ ID NO: 15813 - RNA, 18 nt, Artificial Sequence
  Synthetic
aggcuguuuuggaaugua

SEQ ID NO: 15814 - RNA, 19 nt, Artificial Sequence
  Synthetic
aaggcuguuuuggaaugua

SEQ ID NO: 15815 - RNA, 20 nt, Artificial Sequence
  Synthetic
aaaggcuguuuuggaaugua

SEQ ID NO: 15816 - RNA, 21 nt, Artificial Sequence
  Synthetic
aaaaggcuguuuuggaaugua

SEQ ID NO: 15817 - RNA, 22 nt, Artificial Sequence
  Synthetic
uaaaaggcuguuuuggaaugua

SEQ ID NO: 15818 - RNA, 23 nt, Artificial Sequence
  Synthetic
auaaaaggcuguuuuggaaugua

SEQ ID NO: 15819 - RNA, 24 nt, Artificial Sequence
  Synthetic
aauaaaaggcuguuuuggaaugua

SEQ ID NO: 15820 - RNA, 18 nt, Artificial Sequence
  Synthetic
uggaauguagagaggcag

SEQ ID NO: 15821 - RNA, 19 nt, Artificial Sequence
  Synthetic
uuggaauguagagaggcag

SEQ ID NO: 15822 - RNA, 20 nt, Artificial Sequence
  Synthetic
uuuggaauguagagaggcag

SEQ ID NO: 15823 - RNA, 21 nt, Artificial Sequence
  Synthetic
uuuuggaauguagagaggcag

SEQ ID NO: 15824 - RNA, 22 nt, Artificial Sequence
  Synthetic
guuuuggaauguagagaggcag

SEQ ID NO: 15825 - RNA, 23 nt, Artificial Sequence
  Synthetic
uguuuuggaauguagagaggcag

SEQ ID NO: 15826 - RNA, 24 nt, Artificial Sequence
  Synthetic
cuguuuuggaauguagagaggcag

SEQ ID NO: 15827 - RNA, 18 nt, Artificial Sequence
  Synthetic
cuuaaauuuuuaugugag

SEQ ID NO: 15828 - RNA, 19 nt, Artificial Sequence
  Synthetic
ucuuaaauuuuuaugugag

SEQ ID NO: 15829 - RNA, 20 nt, Artificial Sequence
  Synthetic
gucuuaaauuuuuaugugag

SEQ ID NO: 15830 - RNA, 21 nt, Artificial Sequence
  Synthetic
cgucuuaaauuuuuaugugag

SEQ ID NO: 15831 - RNA, 22 nt, Artificial Sequence
  Synthetic
ccgucuuaaauuuuuaugugag

SEQ ID NO: 15832 - RNA, 23 nt, Artificial Sequence
  Synthetic
cccgucuuaaauuuuuaugugag

SEQ ID NO: 15833 - RNA, 24 nt, Artificial Sequence
  Synthetic
ucccgucuuaaauuuuuaugugag

SEQ ID NO: 15834 - RNA, 18 nt, Artificial Sequence
  Synthetic
uaagaaagcaguguaagg

SEQ ID NO: 15835 - RNA, 19 nt, Artificial Sequence
  Synthetic
uuaagaaagcaguguaagg

SEQ ID NO: 15836 - RNA, 20 nt, Artificial Sequence
  Synthetic
auuaagaaagcaguguaagg

SEQ ID NO: 15837 - RNA, 21 nt, Artificial Sequence
  Synthetic
aauuaagaaagcaguguaagg

SEQ ID NO: 15838 - RNA, 22 nt, Artificial Sequence
  Synthetic
uaauuaagaaagcaguguaagg

SEQ ID NO: 15839 - RNA, 23 nt, Artificial Sequence
  Synthetic
guaauuaagaaagcaguguaagg

SEQ ID NO: 15840 - RNA, 24 nt, Artificial Sequence
  Synthetic
uguaauuaagaaagcaguguaagg

SEQ ID NO: 15841 - RNA, 18 nt, Artificial Sequence
  Synthetic
uuuuggaauguagagagg

SEQ ID NO: 15842 - RNA, 19 nt, Artificial Sequence
  Synthetic
guuuuggaauguagagagg

SEQ ID NO: 15843 - RNA, 20 nt, Artificial Sequence
  Synthetic
uguuuuggaauguagagagg

SEQ ID NO: 15844 - RNA, 21 nt, Artificial Sequence
  Synthetic
cuguuuuggaauguagagagg

SEQ ID NO: 15845 - RNA, 22 nt, Artificial Sequence
  Synthetic
gcuguuuuggaauguagagagg

SEQ ID NO: 15846 - RNA, 23 nt, Artificial Sequence
  Synthetic
ggcuguuuuggaauguagagagg

SEQ ID NO: 15847 - RNA, 24 nt, Artificial Sequence
  Synthetic
aggcuguuuuggaauguagagagg

SEQ ID NO: 15848 - RNA, 18 nt, Artificial Sequence
  Synthetic
aaaggcuguuuuggaaug

SEQ ID NO: 15849 - RNA, 19 nt, Artificial Sequence
  Synthetic
aaaaggcuguuuuggaaug

SEQ ID NO: 15850 - RNA, 20 nt, Artificial Sequence
  Synthetic
uaaaaggcuguuuuggaaug

SEQ ID NO: 15851 - RNA, 21 nt, Artificial Sequence
  Synthetic
auaaaaggcuguuuuggaaug

SEQ ID NO: 15852 - RNA, 22 nt, Artificial Sequence
  Synthetic
aauaaaaggcuguuuuggaaug

SEQ ID NO: 15853 - RNA, 23 nt, Artificial Sequence
  Synthetic
gaauaaaaggcuguuuuggaaug

SEQ ID NO: 15854 - RNA, 24 nt, Artificial Sequence
  Synthetic
agaauaaaaggcuguuuuggaaug

SEQ ID NO: 15855 - RNA, 18 nt, Artificial Sequence
  Synthetic
agugcaacacaaguugug

SEQ ID NO: 15856 - RNA, 19 nt, Artificial Sequence
  Synthetic
uagugcaacacaaguugug

SEQ ID NO: 15857 - RNA, 20 nt, Artificial Sequence
  Synthetic
cuagugcaacacaaguugug

SEQ ID NO: 15858 - RNA, 21 nt, Artificial Sequence
  Synthetic
ccuagugcaacacaaguugug

SEQ ID NO: 15859 - RNA, 22 nt, Artificial Sequence
  Synthetic
accuagugcaacacaaguugug

SEQ ID NO: 15860 - RNA, 23 nt, Artificial Sequence
  Synthetic
caccuagugcaacacaaguugug

SEQ ID NO: 15861 - RNA, 24 nt, Artificial Sequence
  Synthetic
ucaccuagugcaacacaaguugug

SEQ ID NO: 15862 - RNA, 18 nt, Artificial Sequence
  Synthetic
cccgucuuaaauuuuuau

SEQ ID NO: 15863 - RNA, 19 nt, Artificial Sequence
  Synthetic
ucccgucuuaaauuuuuau

SEQ ID NO: 15864 - RNA, 20 nt, Artificial Sequence
  Synthetic
uucccgucuuaaauuuuuau

SEQ ID NO: 15865 - RNA, 21 nt, Artificial Sequence
  Synthetic
uuucccgucuuaaauuuuuau

SEQ ID NO: 15866 - RNA, 22 nt, Artificial Sequence
  Synthetic
uuuucccgucuuaaauuuuuau

SEQ ID NO: 15867 - RNA, 23 nt, Artificial Sequence
  Synthetic
guuuucccgucuuaaauuuuuau

SEQ ID NO: 15868 - RNA, 24 nt, Artificial Sequence
  Synthetic
uguuuucccgucuuaaauuuuuau

SEQ ID NO: 15869 - RNA, 18 nt, Artificial Sequence
  Synthetic
gagcacacugcuguaauu

SEQ ID NO: 15870 - RNA, 19 nt, Artificial Sequence
  Synthetic
ugagcacacugcuguaauu

SEQ ID NO: 15871 - RNA, 20 nt, Artificial Sequence
  Synthetic
augagcacacugcuguaauu

SEQ ID NO: 15872 - RNA, 21 nt, Artificial Sequence
  Synthetic
gaugagcacacugcuguaauu

SEQ ID NO: 15873 - RNA, 22 nt, Artificial Sequence
  Synthetic
agaugagcacacugcuguaauu

SEQ ID NO: 15874 - RNA, 23 nt, Artificial Sequence
  Synthetic
gagaugagcacacugcuguaauu

SEQ ID NO: 15875 - RNA, 24 nt, Artificial Sequence
  Synthetic
ugagaugagcacacugcuguaauu

SEQ ID NO: 15876 - RNA, 18 nt, Artificial Sequence
  Synthetic
uuagaauaaaaggcuguu

SEQ ID NO: 15877 - RNA, 19 nt, Artificial Sequence
  Synthetic
auuagaauaaaaggcuguu

SEQ ID NO: 15878 - RNA, 20 nt, Artificial Sequence
  Synthetic
aauuagaauaaaaggcuguu

SEQ ID NO: 15879 - RNA, 21 nt, Artificial Sequence
  Synthetic
uaauuagaauaaaaggcuguu

SEQ ID NO: 15880 - RNA, 22 nt, Artificial Sequence
  Synthetic
auaauuagaauaaaaggcuguu

SEQ ID NO: 15881 - RNA, 23 nt, Artificial Sequence
  Synthetic
aauaauuagaauaaaaggcuguu

SEQ ID NO: 15882 - RNA, 24 nt, Artificial Sequence
  Synthetic
aaauaauuagaauaaaaggcuguu

SEQ ID NO: 15883 - RNA, 18 nt, Artificial Sequence
  Synthetic
uuucauuuuuugcugaca

SEQ ID NO: 15884 - RNA, 19 nt, Artificial Sequence
  Synthetic
guuucauuuuuugcugaca

SEQ ID NO: 15885 - RNA, 20 nt, Artificial Sequence
  Synthetic
uguuucauuuuuugcugaca

SEQ ID NO: 15886 - RNA, 21 nt, Artificial Sequence
  Synthetic
uuguuucauuuuuugcugaca

SEQ ID NO: 15887 - RNA, 22 nt, Artificial Sequence
  Synthetic
uuuguuucauuuuuugcugaca

SEQ ID NO: 15888 - RNA, 23 nt, Artificial Sequence
  Synthetic
uuuuguuucauuuuuugcugaca

SEQ ID NO: 15889 - RNA, 24 nt, Artificial Sequence
  Synthetic
uuuuuguuucauuuuuugcugaca

SEQ ID NO: 15890 - RNA, 18 nt, Artificial Sequence
  Synthetic
aauaguuugcuuccccca

SEQ ID NO: 15891 - RNA, 19 nt, Artificial Sequence
  Synthetic
aaauaguuugcuuccccca

SEQ ID NO: 15892 - RNA, 20 nt, Artificial Sequence
  Synthetic
uaaauaguuugcuuccccca

SEQ ID NO: 15893 - RNA, 21 nt, Artificial Sequence
  Synthetic
guaaauaguuugcuuccccca

SEQ ID NO: 15894 - RNA, 22 nt, Artificial Sequence
  Synthetic
uguaaauaguuugcuuccccca

SEQ ID NO: 15895 - RNA, 23 nt, Artificial Sequence
  Synthetic
cuguaaauaguuugcuuccccca

SEQ ID NO: 15896 - RNA, 24 nt, Artificial Sequence
  Synthetic
gcuguaaauaguuugcuuccccca

SEQ ID NO: 15897 - RNA, 18 nt, Artificial Sequence
  Synthetic
aauacuuacuguacugca

SEQ ID NO: 15898 - RNA, 19 nt, Artificial Sequence
  Synthetic
aaauacuuacuguacugca

SEQ ID NO: 15899 - RNA, 20 nt, Artificial Sequence
  Synthetic
aaaauacuuacuguacugca

SEQ ID NO: 15900 - RNA, 21 nt, Artificial Sequence
  Synthetic
gaaaauacuuacuguacugca

SEQ ID NO: 15901 - RNA, 22 nt, Artificial Sequence
  Synthetic
agaaaauacuuacuguacugca

SEQ ID NO: 15902 - RNA, 23 nt, Artificial Sequence
  Synthetic
aagaaaauacuuacuguacugca

SEQ ID NO: 15903 - RNA, 24 nt, Artificial Sequence
  Synthetic
aaagaaaauacuuacuguacugca

SEQ ID NO: 15904 - RNA, 18 nt, Artificial Sequence
  Synthetic
ugcuacuuauacaauuca

SEQ ID NO: 15905 - RNA, 19 nt, Artificial Sequence
  Synthetic
gugcuacuuauacaauuca

SEQ ID NO: 15906 - RNA, 20 nt, Artificial Sequence
  Synthetic
agugcuacuuauacaauuca

SEQ ID NO: 15907 - RNA, 21 nt, Artificial Sequence
  Synthetic
cagugcuacuuauacaauuca

SEQ ID NO: 15908 - RNA, 22 nt, Artificial Sequence
  Synthetic
ucagugcuacuuauacaauuca

SEQ ID NO: 15909 - RNA, 23 nt, Artificial Sequence
  Synthetic
cucagugcuacuuauacaauuca

SEQ ID NO: 15910 - RNA, 24 nt, Artificial Sequence
  Synthetic
acucagugcuacuuauacaauuca

SEQ ID NO: 15911 - RNA, 18 nt, Artificial Sequence
  Synthetic
guuugcuucccccaauga

SEQ ID NO: 15912 - RNA, 19 nt, Artificial Sequence
  Synthetic
aguuugcuucccccaauga

SEQ ID NO: 15913 - RNA, 20 nt, Artificial Sequence
  Synthetic
uaguuugcuucccccaauga

SEQ ID NO: 15914 - RNA, 21 nt, Artificial Sequence
  Synthetic
auaguuugcuucccccaauga

SEQ ID NO: 15915 - RNA, 22 nt, Artificial Sequence
  Synthetic
aauaguuugcuucccccaauga

SEQ ID NO: 15916 - RNA, 23 nt, Artificial Sequence
  Synthetic
aaauaguuugcuucccccaauga

SEQ ID NO: 15917 - RNA, 24 nt, Artificial Sequence
  Synthetic
uaaauaguuugcuucccccaauga

SEQ ID NO: 15918 - RNA, 18 nt, Artificial Sequence
  Synthetic
uuucuaguuuugcuuaac

SEQ ID NO: 15919 - RNA, 19 nt, Artificial Sequence
  Synthetic
cuuucuaguuuugcuuaac

SEQ ID NO: 15920 - RNA, 20 nt, Artificial Sequence
  Synthetic
acuuucuaguuuugcuuaac

SEQ ID NO: 15921 - RNA, 21 nt, Artificial Sequence
  Synthetic
aacuuucuaguuuugcuuaac

SEQ ID NO: 15922 - RNA, 22 nt, Artificial Sequence
  Synthetic
aaacuuucuaguuuugcuuaac

SEQ ID NO: 15923 - RNA, 23 nt, Artificial Sequence
  Synthetic
aaaacuuucuaguuuugcuuaac

SEQ ID NO: 15924 - RNA, 24 nt, Artificial Sequence
  Synthetic
uaaaacuuucuaguuuugcuuaac

SEQ ID NO: 15925 - RNA, 18 nt, Artificial Sequence
  Synthetic
gcuacuuauacaauucac

SEQ ID NO: 15926 - RNA, 19 nt, Artificial Sequence
  Synthetic
ugcuacuuauacaauucac

SEQ ID NO: 15927 - RNA, 20 nt, Artificial Sequence
  Synthetic
gugcuacuuauacaauucac

SEQ ID NO: 15928 - RNA, 21 nt, Artificial Sequence
  Synthetic
agugcuacuuauacaauucac

SEQ ID NO: 15929 - RNA, 22 nt, Artificial Sequence
  Synthetic
cagugcuacuuauacaauucac

SEQ ID NO: 15930 - RNA, 23 nt, Artificial Sequence
  Synthetic
ucagugcuacuuauacaauucac

SEQ ID NO: 15931 - RNA, 24 nt, Artificial Sequence
  Synthetic
cucagugcuacuuauacaauucac

SEQ ID NO: 15932 - RNA, 18 nt, Artificial Sequence
  Synthetic
aaauacuuacuguacugc

SEQ ID NO: 15933 - RNA, 19 nt, Artificial Sequence
  Synthetic
aaaauacuuacuguacugc

SEQ ID NO: 15934 - RNA, 20 nt, Artificial Sequence
  Synthetic
gaaaauacuuacuguacugc

SEQ ID NO: 15935 - RNA, 21 nt, Artificial Sequence
  Synthetic
agaaaauacuuacuguacugc

SEQ ID NO: 15936 - RNA, 22 nt, Artificial Sequence
  Synthetic
aagaaaauacuuacuguacugc

SEQ ID NO: 15937 - RNA, 23 nt, Artificial Sequence
  Synthetic
aaagaaaauacuuacuguacugc

SEQ ID NO: 15938 - RNA, 24 nt, Artificial Sequence
  Synthetic
gaaagaaaauacuuacuguacugc

SEQ ID NO: 15939 - RNA, 18 nt, Artificial Sequence
  Synthetic
aaaauacuuacuguacug

SEQ ID NO: 15940 - RNA, 19 nt, Artificial Sequence
  Synthetic
gaaaauacuuacuguacug

SEQ ID NO: 15941 - RNA, 20 nt, Artificial Sequence
  Synthetic
agaaaauacuuacuguacug

SEQ ID NO: 15942 - RNA, 21 nt, Artificial Sequence
  Synthetic
aagaaaauacuuacuguacug

SEQ ID NO: 15943 - RNA, 22 nt, Artificial Sequence
  Synthetic
aaagaaaauacuuacuguacug

SEQ ID NO: 15944 - RNA, 23 nt, Artificial Sequence
  Synthetic
gaaagaaaauacuuacuguacug

SEQ ID NO: 15945 - RNA, 24 nt, Artificial Sequence
  Synthetic
ugaaagaaaauacuuacuguacug

SEQ ID NO: 15946 - RNA, 18 nt, Artificial Sequence
  Synthetic
guucugugucagcaaaaa

SEQ ID NO: 15947 - RNA, 19 nt, Artificial Sequence
  Synthetic
aguucugugucagcaaaaa

SEQ ID NO: 15948 - RNA, 20 nt, Artificial Sequence
  Synthetic
gaguucugugucagcaaaaa

SEQ ID NO: 15949 - RNA, 21 nt, Artificial Sequence
  Synthetic
ugaguucugugucagcaaaaa

SEQ ID NO: 15950 - RNA, 22 nt, Artificial Sequence
  Synthetic
cugaguucugugucagcaaaaa

SEQ ID NO: 15951 - RNA, 23 nt, Artificial Sequence
  Synthetic
acugaguucugugucagcaaaaa

SEQ ID NO: 15952 - RNA, 24 nt, Artificial Sequence
  Synthetic
cacugaguucugugucagcaaaaa

SEQ ID NO: 15953 - RNA, 18 nt, Artificial Sequence
  Synthetic
aguaaguauuuucuuuca

SEQ ID NO: 15954 - RNA, 19 nt, Artificial Sequence
  Synthetic
caguaaguauuuucuuuca

SEQ ID NO: 15955 - RNA, 20 nt, Artificial Sequence
  Synthetic
acaguaaguauuuucuuuca

SEQ ID NO: 15956 - RNA, 21 nt, Artificial Sequence
  Synthetic
uacaguaaguauuuucuuuca

SEQ ID NO: 15957 - RNA, 22 nt, Artificial Sequence
  Synthetic
guacaguaaguauuuucuuuca

SEQ ID NO: 15958 - RNA, 23 nt, Artificial Sequence
  Synthetic
aguacaguaaguauuuucuuuca

SEQ ID NO: 15959 - RNA, 24 nt, Artificial Sequence
  Synthetic
caguacaguaaguauuuucuuuca

SEQ ID NO: 15960 - RNA, 18 nt, Artificial Sequence
  Synthetic
uuucauguuaagcaaaac

SEQ ID NO: 15961 - RNA, 19 nt, Artificial Sequence
  Synthetic
uuuucauguuaagcaaaac

SEQ ID NO: 15962 - RNA, 20 nt, Artificial Sequence
  Synthetic
auuuucauguuaagcaaaac

SEQ ID NO: 15963 - RNA, 21 nt, Artificial Sequence
  Synthetic
uauuuucauguuaagcaaaac

SEQ ID NO: 15964 - RNA, 22 nt, Artificial Sequence
  Synthetic
uuauuuucauguuaagcaaaac

SEQ ID NO: 15965 - RNA, 23 nt, Artificial Sequence
  Synthetic
auuauuuucauguuaagcaaaac

SEQ ID NO: 15966 - RNA, 24 nt, Artificial Sequence
  Synthetic
uauuauuuucauguuaagcaaaac

SEQ ID NO: 15967 - RNA, 18 nt, Artificial Sequence
  Synthetic
aguauuuucuuucauugg

SEQ ID NO: 15968 - RNA, 19 nt, Artificial Sequence
  Synthetic
aaguauuuucuuucauugg

SEQ ID NO: 15969 - RNA, 20 nt, Artificial Sequence
  Synthetic
uaaguauuuucuuucauugg

SEQ ID NO: 15970 - RNA, 21 nt, Artificial Sequence
  Synthetic
guaaguauuuucuuucauugg

SEQ ID NO: 15971 - RNA, 22 nt, Artificial Sequence
  Synthetic
aguaaguauuuucuuucauugg

SEQ ID NO: 15972 - RNA, 23 nt, Artificial Sequence
  Synthetic
caguaaguauuuucuuucauugg

SEQ ID NO: 15973 - RNA, 24 nt, Artificial Sequence
  Synthetic
acaguaaguauuuucuuucauugg

SEQ ID NO: 15974 - RNA, 18 nt, Artificial Sequence
  Synthetic
aaguauuuucuuucauug

SEQ ID NO: 15975 - RNA, 19 nt, Artificial Sequence
  Synthetic
uaaguauuuucuuucauug

SEQ ID NO: 15976 - RNA, 20 nt, Artificial Sequence
  Synthetic
guaaguauuuucuuucauug

SEQ ID NO: 15977 - RNA, 21 nt, Artificial Sequence
  Synthetic
aguaaguauuuucuuucauug

SEQ ID NO: 15978 - RNA, 22 nt, Artificial Sequence
  Synthetic
caguaaguauuuucuuucauug

SEQ ID NO: 15979 - RNA, 23 nt, Artificial Sequence
  Synthetic
acaguaaguauuuucuuucauug

SEQ ID NO: 15980 - RNA, 24 nt, Artificial Sequence
  Synthetic
uacaguaaguauuuucuuucauug

SEQ ID NO: 15981 - RNA, 18 nt, Artificial Sequence
  Synthetic
guaaguauuuucuuucau

SEQ ID NO: 15982 - RNA, 19 nt, Artificial Sequence
  Synthetic
aguaaguauuuucuuucau

SEQ ID NO: 15983 - RNA, 20 nt, Artificial Sequence
  Synthetic
caguaaguauuuucuuucau

SEQ ID NO: 15984 - RNA, 21 nt, Artificial Sequence
  Synthetic
acaguaaguauuuucuuucau

SEQ ID NO: 15985 - RNA, 22 nt, Artificial Sequence
  Synthetic
uacaguaaguauuuucuuucau

SEQ ID NO: 15986 - RNA, 23 nt, Artificial Sequence
  Synthetic
guacaguaaguauuuucuuucau

SEQ ID NO: 15987 - RNA, 24 nt, Artificial Sequence
  Synthetic
aguacaguaaguauuuucuuucau

SEQ ID NO: 15988 - RNA, 18 nt, Artificial Sequence
  Synthetic
uuggcuauugauacugau

SEQ ID NO: 15989 - RNA, 19 nt, Artificial Sequence
  Synthetic
uuuggcuauugauacugau

SEQ ID NO: 15990 - RNA, 20 nt, Artificial Sequence
  Synthetic
cuuuggcuauugauacugau

SEQ ID NO: 15991 - RNA, 21 nt, Artificial Sequence
  Synthetic
ucuuuggcuauugauacugau

SEQ ID NO: 15992 - RNA, 22 nt, Artificial Sequence
  Synthetic
aucuuuggcuauugauacugau

SEQ ID NO: 15993 - RNA, 23 nt, Artificial Sequence
  Synthetic
gaucuuuggcuauugauacugau

SEQ ID NO: 15994 - RNA, 24 nt, Artificial Sequence
  Synthetic
ggaucuuuggcuauugauacugau

SEQ ID NO: 15995 - RNA, 18 nt, Artificial Sequence
  Synthetic
uaaguauuuucuuucauu

SEQ ID NO: 15996 - RNA, 19 nt, Artificial Sequence
  Synthetic
guaaguauuuucuuucauu

SEQ ID NO: 15997 - RNA, 20 nt, Artificial Sequence
  Synthetic
aguaaguauuuucuuucauu

SEQ ID NO: 15998 - RNA, 21 nt, Artificial Sequence
  Synthetic
caguaaguauuuucuuucauu

SEQ ID NO: 15999 - RNA, 22 nt, Artificial Sequence
  Synthetic
acaguaaguauuuucuuucauu

SEQ ID NO: 16000 - RNA, 23 nt, Artificial Sequence
  Synthetic
uacaguaaguauuuucuuucauu

SEQ ID NO: 16001 - RNA, 24 nt, Artificial Sequence
  Synthetic
guacaguaaguauuuucuuucauu

SEQ ID NO: 16002 - RNA, 17 nt, Artificial Sequence
  Synthetic
ggaucuuuggcuauuga

SEQ ID NO: 16003 - RNA, 17 nt, Artificial Sequence
  Synthetic
ucgguaaaacuuucuag

SEQ ID NO: 16004 - RNA, 20 nt, Artificial Sequence
  Synthetic
uuuggaucuuuggcuauuga

SEQ ID NO: 16005 - RNA, 20 nt, Artificial Sequence
  Synthetic
cccuguuauggcuguaaaua

SEQ ID NO: 16006 - RNA, 20 nt, Artificial Sequence
  Synthetic
aauucgguaaaacuuucuag

SEQ ID NO: 16007 - RNA, 17 nt, Artificial Sequence
  Synthetic
cacugcgcccagccuua

SEQ ID NO: 16008 - RNA, 20 nt, Artificial Sequence
  Synthetic
agccacugcgcccagccuua

SEQ ID NO: 16009 - RNA, 17 nt, Artificial Sequence
  Synthetic
uguuauggcuguaaaua

SEQ ID NO: 16010 - RNA, 17 nt, Artificial Sequence
  Synthetic
guucaccuugccccaca

SEQ ID NO: 16011 - RNA, 17 nt, Artificial Sequence
  Synthetic
aggagucaggugcacca

SEQ ID NO: 16012 - RNA, 17 nt, Artificial Sequence
  Synthetic
uacugcccuguggggca

SEQ ID NO: 16013 - RNA, 17 nt, Artificial Sequence
  Synthetic
gcugggcauaaaaguca

SEQ ID NO: 16014 - RNA, 17 nt, Artificial Sequence
  Synthetic
guuacaagacagguuua

SEQ ID NO: 16015 - RNA, 17 nt, Artificial Sequence
  Synthetic
aggagaccaauagaaac

SEQ ID NO: 16016 - RNA, 17 nt, Artificial Sequence
  Synthetic
cguucaccuugccccac

SEQ ID NO: 16017 - RNA, 17 nt, Artificial Sequence
  Synthetic
acggcagacuucuccac

SEQ ID NO: 16018 - RNA, 17 nt, Artificial Sequence
  Synthetic
uaucaagguuacaagac

SEQ ID NO: 16019 - RNA, 17 nt, Artificial Sequence
  Synthetic
acuuuuaugcccagccc

SEQ ID NO: 16020 - RNA, 17 nt, Artificial Sequence
  Synthetic
ggcugggcauaaaaguc

SEQ ID NO: 16021 - RNA, 17 nt, Artificial Sequence
  Synthetic
acuucuccacaggaguc

SEQ ID NO: 16022 - RNA, 17 nt, Artificial Sequence
  Synthetic
aauagaaacugggcaug

SEQ ID NO: 16023 - RNA, 17 nt, Artificial Sequence
  Synthetic
cugccguuacugcccug

SEQ ID NO: 16024 - RNA, 17 nt, Artificial Sequence
  Synthetic
ggaugaaguugguggug

SEQ ID NO: 16025 - RNA, 17 nt, Artificial Sequence
  Synthetic
gccguuacugcccugug

SEQ ID NO: 16026 - RNA, 17 nt, Artificial Sequence
  Synthetic
acaugcccaguuucuau

SEQ ID NO: 16027 - RNA, 17 nt, Artificial Sequence
  Synthetic
ggagaccaauagaaacu

SEQ ID NO: 16028 - RNA, 17 nt, Artificial Sequence
  Synthetic
gugaacguggaugaagu

SEQ ID NO: 16029 - RNA, 17 nt, Artificial Sequence
  Synthetic
ugccguuacugcccugu

SEQ ID NO: 16030 - RNA, 20 nt, Artificial Sequence
  Synthetic
cuugccccacagggcaguaa

SEQ ID NO: 16031 - RNA, 20 nt, Artificial Sequence
  Synthetic
cacguucaccuugccccaca

SEQ ID NO: 16032 - RNA, 20 nt, Artificial Sequence
  Synthetic
cacaggagucaggugcacca

SEQ ID NO: 16033 - RNA, 20 nt, Artificial Sequence
  Synthetic
agcagggagggcaggagcca

SEQ ID NO: 16034 - RNA, 20 nt, Artificial Sequence
  Synthetic
cguuacugcccuguggggca

SEQ ID NO: 16035 - RNA, 20 nt, Artificial Sequence
  Synthetic
agggcugggcauaaaaguca

SEQ ID NO: 16036 - RNA, 20 nt, Artificial Sequence
  Synthetic
aagcaaauguaagcaauaga

SEQ ID NO: 16037 - RNA, 20 nt, Artificial Sequence
  Synthetic
aagguuacaagacagguuua

SEQ ID NO: 16038 - RNA, 20 nt, Artificial Sequence
  Synthetic
uuaaggagaccaauagaaac

SEQ ID NO: 16039 - RNA, 20 nt, Artificial Sequence
  Synthetic
guaacggcagacuucuccac

SEQ ID NO: 16040 - RNA, 20 nt, Artificial Sequence
  Synthetic
ugguaucaagguuacaagac

SEQ ID NO: 16041 - RNA, 20 nt, Artificial Sequence
  Synthetic
cugacuuuuaugcccagccc

SEQ ID NO: 16042 - RNA, 20 nt, Artificial Sequence
  Synthetic
ugaaguugguggugaggccc

SEQ ID NO: 16043 - RNA, 20 nt, Artificial Sequence
  Synthetic
gagcagggagggcaggagcc

SEQ ID NO: 16044 - RNA, 20 nt, Artificial Sequence
  Synthetic
cagggcugggcauaaaaguc

SEQ ID NO: 16045 - RNA, 20 nt, Artificial Sequence
  Synthetic
cagacuucuccacaggaguc

SEQ ID NO: 16046 - RNA, 20 nt, Artificial Sequence
  Synthetic
gugaacguggaugaaguugg

SEQ ID NO: 16047 - RNA, 20 nt, Artificial Sequence
  Synthetic
accaauagaaacugggcaug

SEQ ID NO: 16048 - RNA, 20 nt, Artificial Sequence
  Synthetic
agucugccguuacugcccug

SEQ ID NO: 16049 - RNA, 20 nt, Artificial Sequence
  Synthetic
cguggaugaaguugguggug

SEQ ID NO: 16050 - RNA, 20 nt, Artificial Sequence
  Synthetic
ucugccguuacugcccugug

SEQ ID NO: 16051 - RNA, 20 nt, Artificial Sequence
  Synthetic
uaaggagaccaauagaaacu

SEQ ID NO: 16052 - RNA, 20 nt, Artificial Sequence
  Synthetic
gaaguugguggugaggcccu

SEQ ID NO: 16053 - RNA, 20 nt, Artificial Sequence
  Synthetic
ggagggcaggagccagggcu

SEQ ID NO: 16054 - RNA, 20 nt, Artificial Sequence
  Synthetic
aaggugaacguggaugaagu

SEQ ID NO: 16055 - RNA, 20 nt, Artificial Sequence
  Synthetic
gucugccguuacugcccugu

SEQ ID NO: 16056 - RNA, 17 nt, Artificial Sequence
  Synthetic
gccccacagggcaguaa

SEQ ID NO: 16057 - RNA, 17 nt, Artificial Sequence
  Synthetic
guggugaggcccugggc

SEQ ID NO: 16058 - RNA, 17 nt, Artificial Sequence
  Synthetic
guggggcaaggugaacg

SEQ ID NO: 16059 - RNA, 17 nt, Artificial Sequence
  Synthetic
ggugcaccugacuccug

SEQ ID NO: 16060 - RNA, 17 nt, Artificial Sequence
  Synthetic
guugguggugaggcccu

SEQ ID NO: 16061 - RNA, 17 nt, Artificial Sequence
  Synthetic
gggcaggagccagggcu

SEQ ID NO: 16062 - RNA, 20 nt, Artificial Sequence
  Synthetic
gcaaccucaaacagacacca

SEQ ID NO: 16063 - RNA, 20 nt, Artificial Sequence
  Synthetic
gggagggcaggagccagggc

SEQ ID NO: 16064 - RNA, 17 nt, Artificial Sequence
  Synthetic
accucaaacagacacca

SEQ ID NO: 16065 - RNA, 17 nt, Artificial Sequence
  Synthetic
ugauaccaaccugccca

SEQ ID NO: 16066 - RNA, 17 nt, Artificial Sequence
  Synthetic
agggagggcaggagcca

SEQ ID NO: 16067 - RNA, 17 nt, Artificial Sequence
  Synthetic
ugggcagguugguauca

SEQ ID NO: 16068 - RNA, 17 nt, Artificial Sequence
  Synthetic
caaauguaagcaauaga

SEQ ID NO: 16069 - RNA, 17 nt, Artificial Sequence
  Synthetic
aguugguggugaggccc

SEQ ID NO: 16070 - RNA, 17 nt, Artificial Sequence
  Synthetic
uugauaccaaccugccc

SEQ ID NO: 16071 - RNA, 17 nt, Artificial Sequence
  Synthetic
cagggagggcaggagcc

SEQ ID NO: 16072 - RNA, 17 nt, Artificial Sequence
  Synthetic
agggcaggagccagggc

SEQ ID NO: 16073 - RNA, 17 nt, Artificial Sequence
  Synthetic
aacguggaugaaguugg

SEQ ID NO: 16074 - RNA, 17 nt, Artificial Sequence
  Synthetic
accauggugucuguuug

SEQ ID NO: 16075 - RNA, 17 nt, Artificial Sequence
  Synthetic
ugaggcccugggcaggu

SEQ ID NO: 16076 - RNA, 20 nt, Artificial Sequence
  Synthetic
ccuugauaccaaccugccca

SEQ ID NO: 16077 - RNA, 20 nt, Artificial Sequence
  Synthetic
cccugggcagguugguauca

SEQ ID NO: 16078 - RNA, 20 nt, Artificial Sequence
  Synthetic
ccacguucaccuugccccac

SEQ ID NO: 16079 - RNA, 20 nt, Artificial Sequence
  Synthetic
accuugauaccaaccugccc

SEQ ID NO: 16080 - RNA, 20 nt, Artificial Sequence
  Synthetic
uugguggugaggcccugggc

SEQ ID NO: 16081 - RNA, 20 nt, Artificial Sequence
  Synthetic
ccuguggggcaaggugaacg

SEQ ID NO: 16082 - RNA, 20 nt, Artificial Sequence
  Synthetic
cauggugcaccugacuccug

SEQ ID NO: 16083 - RNA, 20 nt, Artificial Sequence
  Synthetic
ugcaccauggugucuguuug

SEQ ID NO: 16084 - RNA, 20 nt, Artificial Sequence
  Synthetic
uggugaggcccugggcaggu

SEQ ID NO: 16085 - RNA, 18 nt, Artificial Sequence
  Synthetic
aacggcagacuucuccac

SEQ ID NO: 16086 - RNA, 19 nt, Artificial Sequence
  Synthetic
uaacggcagacuucuccac

SEQ ID NO: 16087 - RNA, 20 nt, Artificial Sequence
  Synthetic
guaacggcagacuucuccac

SEQ ID NO: 16088 - RNA, 21 nt, Artificial Sequence
  Synthetic
aguaacggcagacuucuccac

SEQ ID NO: 16089 - RNA, 22 nt, Artificial Sequence
  Synthetic
caguaacggcagacuucuccac

SEQ ID NO: 16090 - RNA, 23 nt, Artificial Sequence
  Synthetic
gcaguaacggcagacuucuccac

SEQ ID NO: 16091 - RNA, 24 nt, Artificial Sequence
  Synthetic
ggcaguaacggcagacuucuccac

SEQ ID NO: 16092 - RNA, 18 nt, Artificial Sequence
  Synthetic
cuguggggcaaggugaac

SEQ ID NO: 16093 - RNA, 19 nt, Artificial Sequence
  Synthetic
ccuguggggcaaggugaac

SEQ ID NO: 16094 - RNA, 20 nt, Artificial Sequence
  Synthetic
cccuguggggcaaggugaac

SEQ ID NO: 16095 - RNA, 21 nt, Artificial Sequence
  Synthetic
gcccuguggggcaaggugaac

SEQ ID NO: 16096 - RNA, 22 nt, Artificial Sequence
  Synthetic
ugcccuguggggcaaggugaac

SEQ ID NO: 16097 - RNA, 23 nt, Artificial Sequence
  Synthetic
cugcccuguggggcaaggugaac

SEQ ID NO: 16098 - RNA, 24 nt, Artificial Sequence
  Synthetic
acugcccuguggggcaaggugaac

SEQ ID NO: 16099 - RNA, 18 nt, Artificial Sequence
  Synthetic
cacguucaccuugcccca

SEQ ID NO: 16100 - RNA, 19 nt, Artificial Sequence
  Synthetic
ccacguucaccuugcccca

SEQ ID NO: 16101 - RNA, 20 nt, Artificial Sequence
  Synthetic
uccacguucaccuugcccca

SEQ ID NO: 16102 - RNA, 21 nt, Artificial Sequence
  Synthetic
auccacguucaccuugcccca

SEQ ID NO: 16103 - RNA, 22 nt, Artificial Sequence
  Synthetic
cauccacguucaccuugcccca

SEQ ID NO: 16104 - RNA, 23 nt, Artificial Sequence
  Synthetic
ucauccacguucaccuugcccca

SEQ ID NO: 16105 - RNA, 24 nt, Artificial Sequence
  Synthetic
uucauccacguucaccuugcccca

SEQ ID NO: 16106 - RNA, 18 nt, Artificial Sequence
  Synthetic
uaacggcagacuucucca

SEQ ID NO: 16107 - RNA, 19 nt, Artificial Sequence
  Synthetic
guaacggcagacuucucca

SEQ ID NO: 16108 - RNA, 20 nt, Artificial Sequence
  Synthetic
aguaacggcagacuucucca

SEQ ID NO: 16109 - RNA, 21 nt, Artificial Sequence
  Synthetic
caguaacggcagacuucucca

SEQ ID NO: 16110 - RNA, 22 nt, Artificial Sequence
  Synthetic
gcaguaacggcagacuucucca

SEQ ID NO: 16111 - RNA, 23 nt, Artificial Sequence
  Synthetic
ggcaguaacggcagacuucucca

SEQ ID NO: 16112 - RNA, 24 nt, Artificial Sequence
  Synthetic
gggcaguaacggcagacuucucca

SEQ ID NO: 16113 - RNA, 18 nt, Artificial Sequence
  Synthetic
gucuguuugagguugcua

SEQ ID NO: 16114 - RNA, 19 nt, Artificial Sequence
  Synthetic
ugucuguuugagguugcua

SEQ ID NO: 16115 - RNA, 20 nt, Artificial Sequence
  Synthetic
gugucuguuugagguugcua

SEQ ID NO: 16116 - RNA, 21 nt, Artificial Sequence
  Synthetic
ggugucuguuugagguugcua

SEQ ID NO: 16117 - RNA, 22 nt, Artificial Sequence
  Synthetic
uggugucuguuugagguugcua

SEQ ID NO: 16118 - RNA, 23 nt, Artificial Sequence
  Synthetic
auggugucuguuugagguugcua

SEQ ID NO: 16119 - RNA, 24 nt, Artificial Sequence
  Synthetic
cauggugucuguuugagguugcua

SEQ ID NO: 16120 - RNA, 18 nt, Artificial Sequence
  Synthetic
ccuugauaccaaccugcc

SEQ ID NO: 16121 - RNA, 19 nt, Artificial Sequence
  Synthetic
accuugauaccaaccugcc

SEQ ID NO: 16122 - RNA, 20 nt, Artificial Sequence
  Synthetic
aaccuugauaccaaccugcc

SEQ ID NO: 16123 - RNA, 21 nt, Artificial Sequence
  Synthetic
uaaccuugauaccaaccugcc

SEQ ID NO: 16124 - RNA, 22 nt, Artificial Sequence
  Synthetic
guaaccuugauaccaaccugcc

SEQ ID NO: 16125 - RNA, 23 nt, Artificial Sequence
  Synthetic
uguaaccuugauaccaaccugcc

SEQ ID NO: 16126 - RNA, 24 nt, Artificial Sequence
  Synthetic
uuguaaccuugauaccaaccugcc

SEQ ID NO: 16127 - RNA, 18 nt, Artificial Sequence
  Synthetic
gugcaccauggugucugu

SEQ ID NO: 16128 - RNA, 19 nt, Artificial Sequence
  Synthetic
ggugcaccauggugucugu

SEQ ID NO: 16129 - RNA, 20 nt, Artificial Sequence
  Synthetic
aggugcaccauggugucugu

SEQ ID NO: 16130 - RNA, 21 nt, Artificial Sequence
  Synthetic
caggugcaccauggugucugu

SEQ ID NO: 16131 - RNA, 22 nt, Artificial Sequence
  Synthetic
ucaggugcaccauggugucugu

SEQ ID NO: 16132 - RNA, 23 nt, Artificial Sequence
  Synthetic
gucaggugcaccauggugucugu

SEQ ID NO: 16133 - RNA, 24 nt, Artificial Sequence
  Synthetic
agucaggugcaccauggugucugu

SEQ ID NO: 16134 - RNA, 18 nt, Artificial Sequence
  Synthetic
uagugaacacaguugugu

SEQ ID NO: 16135 - RNA, 19 nt, Artificial Sequence
  Synthetic
cuagugaacacaguugugu

SEQ ID NO: 16136 - RNA, 20 nt, Artificial Sequence
  Synthetic
gcuagugaacacaguugugu

SEQ ID NO: 16137 - RNA, 21 nt, Artificial Sequence
  Synthetic
ugcuagugaacacaguugugu

SEQ ID NO: 16138 - RNA, 22 nt, Artificial Sequence
  Synthetic
uugcuagugaacacaguugugu

SEQ ID NO: 16139 - RNA, 23 nt, Artificial Sequence
  Synthetic
guugcuagugaacacaguugugu

SEQ ID NO: 16140 - RNA, 24 nt, Artificial Sequence
  Synthetic
gguugcuagugaacacaguugugu

SEQ ID NO: 16141 - RNA, 18 nt, Artificial Sequence
  Synthetic
uaaggagaccaauagaaa

SEQ ID NO: 16142 - RNA, 19 nt, Artificial Sequence
  Synthetic
uuaaggagaccaauagaaa

SEQ ID NO: 16143 - RNA, 20 nt, Artificial Sequence
  Synthetic
uuuaaggagaccaauagaaa

SEQ ID NO: 16144 - RNA, 21 nt, Artificial Sequence
  Synthetic
guuuaaggagaccaauagaaa

SEQ ID NO: 16145 - RNA, 22 nt, Artificial Sequence
  Synthetic
gguuuaaggagaccaauagaaa

SEQ ID NO: 16146 - RNA, 23 nt, Artificial Sequence
  Synthetic
agguuuaaggagaccaauagaaa

SEQ ID NO: 16147 - RNA, 24 nt, Artificial Sequence
  Synthetic
cagguuuaaggagaccaauagaaa

SEQ ID NO: 16148 - RNA, 18 nt, Artificial Sequence
  Synthetic
cagguuuaaggagaccaa

SEQ ID NO: 16149 - RNA, 19 nt, Artificial Sequence
  Synthetic
acagguuuaaggagaccaa

SEQ ID NO: 16150 - RNA, 20 nt, Artificial Sequence
  Synthetic
gacagguuuaaggagaccaa

SEQ ID NO: 16151 - RNA, 21 nt, Artificial Sequence
  Synthetic
agacagguuuaaggagaccaa

SEQ ID NO: 16152 - RNA, 22 nt, Artificial Sequence
  Synthetic
aagacagguuuaaggagaccaa

SEQ ID NO: 16153 - RNA, 23 nt, Artificial Sequence
  Synthetic
caagacagguuuaaggagaccaa

SEQ ID NO: 16154 - RNA, 24 nt, Artificial Sequence
  Synthetic
acaagacagguuuaaggagaccaa

SEQ ID NO: 16155 - RNA, 18 nt, Artificial Sequence
  Synthetic
gguuacaagacagguuua

SEQ ID NO: 16156 - RNA, 19 nt, Artificial Sequence
  Synthetic
agguuacaagacagguuua

SEQ ID NO: 16157 - RNA, 20 nt, Artificial Sequence
  Synthetic
aagguuacaagacagguuua

SEQ ID NO: 16158 - RNA, 21 nt, Artificial Sequence
  Synthetic
caagguuacaagacagguuua

SEQ ID NO: 16159 - RNA, 22 nt, Artificial Sequence
  Synthetic
ucaagguuacaagacagguuua

SEQ ID NO: 16160 - RNA, 23 nt, Artificial Sequence
  Synthetic
aucaagguuacaagacagguuua

SEQ ID NO: 16161 - RNA, 24 nt, Artificial Sequence
  Synthetic
uaucaagguuacaagacagguuua

SEQ ID NO: 16162 - RNA, 18 nt, Artificial Sequence
  Synthetic
gaaguugguggugaggcc

SEQ ID NO: 16163 - RNA, 19 nt, Artificial Sequence
  Synthetic
ugaaguugguggugaggcc

SEQ ID NO: 16164 - RNA, 20 nt, Artificial Sequence
  Synthetic
augaaguugguggugaggcc

SEQ ID NO: 16165 - RNA, 21 nt, Artificial Sequence
  Synthetic
gaugaaguugguggugaggcc

SEQ ID NO: 16166 - RNA, 22 nt, Artificial Sequence
  Synthetic
ggaugaaguugguggugaggcc

SEQ ID NO: 16167 - RNA, 23 nt, Artificial Sequence
  Synthetic
uggaugaaguugguggugaggcc

SEQ ID NO: 16168 - RNA, 24 nt, Artificial Sequence
  Synthetic
guggaugaaguugguggugaggcc

SEQ ID NO: 16169 - RNA, 18 nt, Artificial Sequence
  Synthetic
acugcccuguggggcaag

SEQ ID NO: 16170 - RNA, 19 nt, Artificial Sequence
  Synthetic
uacugcccuguggggcaag

SEQ ID NO: 16171 - RNA, 20 nt, Artificial Sequence
  Synthetic
uuacugcccuguggggcaag

SEQ ID NO: 16172 - RNA, 21 nt, Artificial Sequence
  Synthetic
guuacugcccuguggggcaag

SEQ ID NO: 16173 - RNA, 22 nt, Artificial Sequence
  Synthetic
cguuacugcccuguggggcaag

SEQ ID NO: 16174 - RNA, 23 nt, Artificial Sequence
  Synthetic
ccguuacugcccuguggggcaag

SEQ ID NO: 16175 - RNA, 24 nt, Artificial Sequence
  Synthetic
gccguuacugcccuguggggcaag

SEQ ID NO: 16176 - RNA, 18 nt, Artificial Sequence
  Synthetic
ggagggcaggagccaggg

SEQ ID NO: 16177 - RNA, 19 nt, Artificial Sequence
  Synthetic
gggagggcaggagccaggg

SEQ ID NO: 16178 - RNA, 20 nt, Artificial Sequence
  Synthetic
agggagggcaggagccaggg

SEQ ID NO: 16179 - RNA, 21 nt, Artificial Sequence
  Synthetic
cagggagggcaggagccaggg

SEQ ID NO: 16180 - RNA, 22 nt, Artificial Sequence
  Synthetic
gcagggagggcaggagccaggg

SEQ ID NO: 16181 - RNA, 23 nt, Artificial Sequence
  Synthetic
agcagggagggcaggagccaggg

SEQ ID NO: 16182 - RNA, 24 nt, Artificial Sequence
  Synthetic
gagcagggagggcaggagccaggg

SEQ ID NO: 16183 - RNA, 18 nt, Artificial Sequence
  Synthetic
ugggcauaaaagucaggg

SEQ ID NO: 16184 - RNA, 19 nt, Artificial Sequence
  Synthetic
cugggcauaaaagucaggg

SEQ ID NO: 16185 - RNA, 20 nt, Artificial Sequence
  Synthetic
gcugggcauaaaagucaggg

SEQ ID NO: 16186 - RNA, 21 nt, Artificial Sequence
  Synthetic
ggcugggcauaaaagucaggg

SEQ ID NO: 16187 - RNA, 22 nt, Artificial Sequence
  Synthetic
gggcugggcauaaaagucaggg

SEQ ID NO: 16188 - RNA, 23 nt, Artificial Sequence
  Synthetic
agggcugggcauaaaagucaggg

SEQ ID NO: 16189 - RNA, 24 nt, Artificial Sequence
  Synthetic
cagggcugggcauaaaagucaggg

SEQ ID NO: 16190 - RNA, 18 nt, Artificial Sequence
  Synthetic
ggggcaaggugaacgugg

SEQ ID NO: 16191 - RNA, 19 nt, Artificial Sequence
  Synthetic
uggggcaaggugaacgugg

SEQ ID NO: 16192 - RNA, 20 nt, Artificial Sequence
  Synthetic
guggggcaaggugaacgugg

SEQ ID NO: 16193 - RNA, 21 nt, Artificial Sequence
  Synthetic
uguggggcaaggugaacgugg

SEQ ID NO: 16194 - RNA, 22 nt, Artificial Sequence
  Synthetic
cuguggggcaaggugaacgugg

SEQ ID NO: 16195 - RNA, 23 nt, Artificial Sequence
  Synthetic
ccuguggggcaaggugaacgugg

SEQ ID NO: 16196 - RNA, 24 nt, Artificial Sequence
  Synthetic
cccuguggggcaaggugaacgugg

SEQ ID NO: 16197 - RNA, 18 nt, Artificial Sequence
  Synthetic
ucugccguuacugcccug

SEQ ID NO: 16198 - RNA, 19 nt, Artificial Sequence
  Synthetic
gucugccguuacugcccug

SEQ ID NO: 16199 - RNA, 20 nt, Artificial Sequence
  Synthetic
agucugccguuacugcccug

SEQ ID NO: 16200 - RNA, 21 nt, Artificial Sequence
  Synthetic
aagucugccguuacugcccug

SEQ ID NO: 16201 - RNA, 22 nt, Artificial Sequence
  Synthetic
gaagucugccguuacugcccug

SEQ ID NO: 16202 - RNA, 23 nt, Artificial Sequence
  Synthetic
agaagucugccguuacugcccug

SEQ ID NO: 16203 - RNA, 24 nt, Artificial Sequence
  Synthetic
gagaagucugccguuacugcccug

SEQ ID NO: 16204 - RNA, 18 nt, Artificial Sequence
  Synthetic
uggugcaccugacuccug

SEQ ID NO: 16205 - RNA, 19 nt, Artificial Sequence
  Synthetic
auggugcaccugacuccug

SEQ ID NO: 16206 - RNA, 20 nt, Artificial Sequence
  Synthetic
cauggugcaccugacuccug

SEQ ID NO: 16207 - RNA, 21 nt, Artificial Sequence
  Synthetic
ccauggugcaccugacuccug

SEQ ID NO: 16208 - RNA, 22 nt, Artificial Sequence
  Synthetic
accauggugcaccugacuccug

SEQ ID NO: 16209 - RNA, 23 nt, Artificial Sequence
  Synthetic
caccauggugcaccugacuccug

SEQ ID NO: 16210 - RNA, 24 nt, Artificial Sequence
  Synthetic
acaccauggugcaccugacuccug

SEQ ID NO: 16211 - RNA, 18 nt, Artificial Sequence
  Synthetic
acguggaugaaguuggug

SEQ ID NO: 16212 - RNA, 19 nt, Artificial Sequence
  Synthetic
aacguggaugaaguuggug

SEQ ID NO: 16213 - RNA, 20 nt, Artificial Sequence
  Synthetic
gaacguggaugaaguuggug

SEQ ID NO: 16214 - RNA, 21 nt, Artificial Sequence
  Synthetic
ugaacguggaugaaguuggug

SEQ ID NO: 16215 - RNA, 22 nt, Artificial Sequence
  Synthetic
gugaacguggaugaaguuggug

SEQ ID NO: 16216 - RNA, 23 nt, Artificial Sequence
  Synthetic
ggugaacguggaugaaguuggug

SEQ ID NO: 16217 - RNA, 24 nt, Artificial Sequence
  Synthetic
aggugaacguggaugaaguuggug

SEQ ID NO: 16218 - RNA, 18 nt, Artificial Sequence
  Synthetic
gugcaccugacuccugug

SEQ ID NO: 16219 - RNA, 19 nt, Artificial Sequence
  Synthetic
ggugcaccugacuccugug

SEQ ID NO: 16220 - RNA, 20 nt, Artificial Sequence
  Synthetic
uggugcaccugacuccugug

SEQ ID NO: 16221 - RNA, 21 nt, Artificial Sequence
  Synthetic
auggugcaccugacuccugug

SEQ ID NO: 16222 - RNA, 22 nt, Artificial Sequence
  Synthetic
cauggugcaccugacuccugug

SEQ ID NO: 16223 - RNA, 23 nt, Artificial Sequence
  Synthetic
ccauggugcaccugacuccugug

SEQ ID NO: 16224 - RNA, 24 nt, Artificial Sequence
  Synthetic
accauggugcaccugacuccugug

SEQ ID NO: 16225 - RNA, 18 nt, Artificial Sequence
  Synthetic
gucugccguuacugcccu

SEQ ID NO: 16226 - RNA, 19 nt, Artificial Sequence
  Synthetic
agucugccguuacugcccu

SEQ ID NO: 16227 - RNA, 20 nt, Artificial Sequence
  Synthetic
aagucugccguuacugcccu

SEQ ID NO: 16228 - RNA, 21 nt, Artificial Sequence
  Synthetic
gaagucugccguuacugcccu

SEQ ID NO: 16229 - RNA, 22 nt, Artificial Sequence
  Synthetic
agaagucugccguuacugcccu

SEQ ID NO: 16230 - RNA, 23 nt, Artificial Sequence
  Synthetic
gagaagucugccguuacugcccu

SEQ ID NO: 16231 - RNA, 24 nt, Artificial Sequence
  Synthetic
ggagaagucugccguuacugcccu

SEQ ID NO: 16232 - RNA, 18 nt, Artificial Sequence
  Synthetic
auggugcaccugacuccu

SEQ ID NO: 16233 - RNA, 19 nt, Artificial Sequence
  Synthetic
cauggugcaccugacuccu

SEQ ID NO: 16234 - RNA, 20 nt, Artificial Sequence
  Synthetic
ccauggugcaccugacuccu

SEQ ID NO: 16235 - RNA, 21 nt, Artificial Sequence
  Synthetic
accauggugcaccugacuccu

SEQ ID NO: 16236 - RNA, 22 nt, Artificial Sequence
  Synthetic
caccauggugcaccugacuccu

SEQ ID NO: 16237 - RNA, 23 nt, Artificial Sequence
  Synthetic
acaccauggugcaccugacuccu

SEQ ID NO: 16238 - RNA, 24 nt, Artificial Sequence
  Synthetic
gacaccauggugcaccugacuccu

SEQ ID NO: 16239 - RNA, 18 nt, Artificial Sequence
  Synthetic
agggcugggcauaaaagu

SEQ ID NO: 16240 - RNA, 19 nt, Artificial Sequence
  Synthetic
cagggcugggcauaaaagu

SEQ ID NO: 16241 - RNA, 20 nt, Artificial Sequence
  Synthetic
ccagggcugggcauaaaagu

SEQ ID NO: 16242 - RNA, 21 nt, Artificial Sequence
  Synthetic
gccagggcugggcauaaaagu

SEQ ID NO: 16243 - RNA, 22 nt, Artificial Sequence
  Synthetic
agccagggcugggcauaaaagu

SEQ ID NO: 16244 - RNA, 23 nt, Artificial Sequence
  Synthetic
gagccagggcugggcauaaaagu

SEQ ID NO: 16245 - RNA, 24 nt, Artificial Sequence
  Synthetic
ggagccagggcugggcauaaaagu

SEQ ID NO: 16246 - RNA, 18 nt, Artificial Sequence
  Synthetic
agguuacaagacagguuu

SEQ ID NO: 16247 - RNA, 19 nt, Artificial Sequence
  Synthetic
aagguuacaagacagguuu

SEQ ID NO: 16248 - RNA, 20 nt, Artificial Sequence
  Synthetic
caagguuacaagacagguuu

SEQ ID NO: 16249 - RNA, 21 nt, Artificial Sequence
  Synthetic
ucaagguuacaagacagguuu

SEQ ID NO: 16250 - RNA, 22 nt, Artificial Sequence
  Synthetic
aucaagguuacaagacagguuu

SEQ ID NO: 16251 - RNA, 23 nt, Artificial Sequence
  Synthetic
uaucaagguuacaagacagguuu

SEQ ID NO: 16252 - RNA, 24 nt, Artificial Sequence
  Synthetic
guaucaagguuacaagacagguuu

SEQ ID NO: 16253 - RNA, 17 nt, Artificial Sequence
  Synthetic
agccaucuauugcuuac

SEQ ID NO: 16254 - RNA, 17 nt, Artificial Sequence
  Synthetic
gucagggcagagccauc

SEQ ID NO: 16255 - RNA, 20 nt, Artificial Sequence
  Synthetic
cagagccaucuauugcuuac

SEQ ID NO: 16256 - RNA, 20 nt, Artificial Sequence
  Synthetic
aaagucagggcagagccauc

SEQ ID NO: 16257 - DNA, 1072 bp, Artificial Sequence
  Synthetic
ataggaacttgaatcaaggaaatgattttaaaacgcagtattcttagtggactagaggaaaaaaataatctgagccaagtagaagaccttttcccctcctacccctactttctaagtcacagaggctttttgttcccccagacactcttgcagattagtccaggcagaaacagttagatgtccccagttaacctcctatttgacaccactgattaccccattgatagtcacactttgggttgtaagtgactttttatttatttgtatttttgactgcattaagaggtctctagttttttatctcttgtttcccaaaacctaataagtaactaatgcacagagcacattgatttgtatttattctatttttagacataatttattagcatgcatgagcaaattaagaaaaacaacaacaaatgaatgcatatatatgtatatgtatgtgtgtatatatacacacatatatatatatattttttcttttcttaccagaaggttttaatccaaataaggagaagatatgcttagaaccgaggtagagttttcatccattctgtcctgtaagtattttgcatattctggagacgcaggaagagatccatctacatatcccaaagctgaattatggtagacaaaactcttccacttttagtgcatcaacttcttatttgtgtaataagaaaattgggaaaacgatcttcaatatgcttaccaagctgtgattccaaatattacgtaaatacacttgcaaaggaggatgtttttagtagcaatttgtactgatggtatggggccaagagatatatcttagagggagggctgagggtttgaagtccaactcctaagccagtgccagaagagccaaggacaggtacggctgtcatcacttagacctcaccctgtggagccacaccctagggttggccaatctactcccaggagcagggagggcaggagccagggctgggcataaaagtcagggcagagccatctattgcttacatttgcttctgacacaactgtgttcactagcaacctcaaacagacaccatggtgcatctgactcctg

SEQ ID NO: 16258 - DNA, 1128 bp, Artificial Sequence
  Synthetic
ggagaagtctgccgttactgccctgtggggcaaggtgaacgtggatgaagttggtggtgaggccctgggcaggttggtatcaaggttacaagacaggtttaaggagaccaatagaaactgggcatgtggagacagagaagactcttgggtttctgataggcactgactctctctgcctattggtctattttcccacccttaggctgctggtggtctacccttggacccagaggttctttgagtcctttggggatctgtccactcctgatgctgttatgggcaaccctaaggtgaaggctcatggcaagaaagtgctcggtgcctttagtgatggcctggctcacctggacaacctcaagggcacctttgccacactgagtgagctgcactgtgacaagctgcacgtggatcctgagaacttcagggtgagtctatgggacgcttgatgttttctttccccttcttttctatggttaagttcatgtcataggaaggggataagtaacagggtacagtttagaatgggaaacagacgaatgattgcatcagtgtggaagtctcaggatcgttttagtttcttttatttgctgttcataacaattgttttcttttgtttaattcttgctttctttttttttcttctccgcaatttttactattatacttaatgccttaacattgtgtataacaaaaggaaatatctctgagatacattaagtaacttaaaaaaaaactttacacagtctgcctagtacattactatttggaatatatgtgtgcttatttgcatattcataatctccctactttattttcttttatttttaattgatacataatcattatacatatttatgggttaaagtgtaatgttttaatatgtgtacacatattgaccaaatcagggtaattttgcatttgtaattttaaaaaatgctttcttcttttaatatacttttttgtttatcttatttctaatactttccctaatctctttctttcagggcaataatgatacaatgtatcatgcctctttgcaccattctaaagaataacagtgataatttctgggttaaggcaatagcaatatctctgcatataaatatttctgcatataaattgtaactg

SEQ ID NO: 16259 - DNA, 2201 bp, Artificial Sequence
  Synthetic
ataggaacttgaatcaaggaaatgattttaaaacgcagtattcttagtggactagaggaaaaaaataatctgagccaagtagaagaccttttcccctcctacccctactttctaagtcacagaggctttttgttcccccagacactcttgcagattagtccaggcagaaacagttagatgtccccagttaacctcctatttgacaccactgattaccccattgatagtcacactttgggttgtaagtgactttttatttatttgtatttttgactgcattaagaggtctctagttttttatctcttgtttcccaaaacctaataagtaactaatgcacagagcacattgatttgtatttattctatttttagacataatttattagcatgcatgagcaaattaagaaaaacaacaacaaatgaatgcatatatatgtatatgtatgtgtgtatatatacacacatatatatatatattttttcttttcttaccagaaggttttaatccaaataaggagaagatatgcttagaaccgaggtagagttttcatccattctgtcctgtaagtattttgcatattctggagacgcaggaagagatccatctacatatcccaaagctgaattatggtagacaaaactcttccacttttagtgcatcaacttcttatttgtgtaataagaaaattgggaaaacgatcttcaatatgcttaccaagctgtgattccaaatattacgtaaatacacttgcaaaggaggatgtttttagtagcaatttgtactgatggtatggggccaagagatatatcttagagggagggctgagggtttgaagtccaactcctaagccagtgccagaagagccaaggacaggtacggctgtcatcacttagacctcaccctgtggagccacaccctagggttggccaatctactcccaggagcagggagggcaggagccagggctgggcataaaagtcagggcagagccatctattgcttacatttgcttctgacacaactgtgttcactagcaacctcaaacagacaccatggtgcatctgactcctgaggagaagtctgccgttactgccctgtggggcaaggtgaacgtggatgaagttggtggtgaggccctgggcaggttggtatcaaggttacaagacaggtttaaggagaccaatagaaactgggcatgtggagacagagaagactcttgggtttctgataggcactgactctctctgcctattggtctattttcccacccttaggctgctggtggtctacccttggacccagaggttctttgagtcctttggggatctgtccactcctgatgctgttatgggcaaccctaaggtgaaggctcatggcaagaaagtgctcggtgcctttagtgatggcctggctcacctggacaacctcaagggcacctttgccacactgagtgagctgcactgtgacaagctgcacgtggatcctgagaacttcagggtgagtctatgggacgcttgatgttttctttccccttcttttctatggttaagttcatgtcataggaaggggataagtaacagggtacagtttagaatgggaaacagacgaatgattgcatcagtgtggaagtctcaggatcgttttagtttcttttatttgctgttcataacaattgttttcttttgtttaattcttgctttctttttttttcttctccgcaatttttactattatacttaatgccttaacattgtgtataacaaaaggaaatatctctgagatacattaagtaacttaaaaaaaaactttacacagtctgcctagtacattactatttggaatatatgtgtgcttatttgcatattcataatctccctactttattttcttttatttttaattgatacataatcattatacatatttatgggttaaagtgtaatgttttaatatgtgtacacatattgaccaaatcagggtaattttgcatttgtaattttaaaaaatgctttcttcttttaatatacttttttgtttatcttatttctaatactttccctaatctctttctttcagggcaataatgatacaatgtatcatgcctctttgcaccattctaaagaataacagtgataatttctgggttaaggcaatagcaatatctctgcatataaatatttctgcatataaattgtaactg

SEQ ID NO: 16260 - DNA, 103 bp, Artificial Sequence
  Synthetic
actgtgttcactagcaacctcaaacagacaccatggtgcatctgactcctggggagaagtctgccgttactgccctgtggggcaaggtgaacgtggatgaagt

SEQ ID NO: 16261 - RNA, 20 nt, Artificial Sequence
  Synthetic
gugcuacuuauacaauucac

SEQ ID NO: 16262 - RNA, 20 nt, Artificial Sequence
  Synthetic
gaaaauacuuacuguacugc

SEQ ID NO: 16263 - RNA, 20 nt, Artificial Sequence
  Synthetic
ggcuguuuuggaauguagag

SEQ ID NO: 16264 - RNA, 20 nt, Artificial Sequence
  Synthetic
auucacuggaaacccuguua

SEQ ID NO: 16265 - RNA, 20 nt, Artificial Sequence
  Synthetic
uacuguacugcaggggaauu

SEQ ID NO: 16266 - RNA, 20 nt, Artificial Sequence
  Synthetic
aaacuauuuacagccauaac

SEQ ID NO: 16267 - RNA, 20 nt, Artificial Sequence
  Synthetic
aaauacuuacuguacugcag

SEQ ID NO: 16268 - RNA, 17 nt, Artificial Sequence
  Synthetic
cuauuuacagccauaac

SEQ ID NO: 16269 - RNA, 17 nt, Artificial Sequence
  Synthetic
cuacuuauacaauucac

SEQ ID NO: 16270 - RNA, 17 nt, Artificial Sequence
  Synthetic
cacuggaaacccuguua

SEQ ID NO: 16271 - RNA, 17 nt, Artificial Sequence
  Synthetic
uacuuacuguacugcag

SEQ ID NO: 16272 - RNA, 17 nt, Artificial Sequence
  Synthetic
uguacugcaggggaauu

SEQ ID NO: 16273 - RNA, 17 nt, Artificial Sequence
  Synthetic
aauacuuacuguacugc

SEQ ID NO: 16274 - RNA, 17 nt, Artificial Sequence
  Synthetic
auacuuacuguacugca

SEQ ID NO: 16275 - RNA, 17 nt, Artificial Sequence
  Synthetic
gaauguagagaggcaga

SEQ ID NO: 16276 - RNA, 17 nt, Artificial Sequence
  Synthetic
ggaauguagagaggcag

SEQ ID NO: 16277 - RNA, 20 nt, Artificial Sequence
  Synthetic
guaaguauuuucuuucauug

SEQ ID NO: 16278 - RNA, 20 nt, Artificial Sequence
  Synthetic
guaauuaagaaagcagugua

SEQ ID NO: 16279 - RNA, 17 nt, Artificial Sequence
  Synthetic
guauuuucuuucauugg

SEQ ID NO: 16280 - RNA, 20 nt, Artificial Sequence
  Synthetic
uggcauccaggucacgccag

SEQ ID NO: 16281 - RNA, 20 nt, Artificial Sequence
  Synthetic
gaugcuuuuuucaucucgau

SEQ ID NO: 16282 - RNA, 20 nt, Artificial Sequence
  Synthetic
gcauccaaucccguggaggu

SEQ ID NO: 16283 - RNA, 20 nt, Artificial Sequence
  Synthetic
uuuucaucucgauuggugaa

SEQ ID NO: 16284 - RNA, 20 nt, Artificial Sequence
  Synthetic
ccagaugaacuucccauugg

SEQ ID NO: 16285 - RNA, 20 nt, Artificial Sequence
  Synthetic
aggaggucaugauccccuuc

SEQ ID NO: 16286 - RNA, 17 nt, Artificial Sequence
  Synthetic
cauccaggucacgccag

SEQ ID NO: 16287 - RNA, 17 nt, Artificial Sequence
  Synthetic
gcuuuuuucaucucgau

SEQ ID NO: 16288 - RNA, 17 nt, Artificial Sequence
  Synthetic
uccaaucccguggaggu

SEQ ID NO: 16289 - RNA, 17 nt, Artificial Sequence
  Synthetic
ucaucucgauuggugaa

SEQ ID NO: 16290 - RNA, 17 nt, Artificial Sequence
  Synthetic
gaugaacuucccauugg

SEQ ID NO: 16291 - DNA, 23 bp, Artificial Sequence
  Synthetic
tgcctacatctgattcagtgagg

SEQ ID NO: 16292 - DNA, 22 bp, Artificial Sequence
  Synthetic
tgcctcattgacaaatttgctc

SEQ ID NO: 16293 - DNA, 20 bp, Artificial Sequence
  Synthetic
agaccgtctctttggtgcag

SEQ ID NO: 16294 - DNA, 20 bp, Artificial Sequence
  Synthetic
gcagtggctttaggctgttt

SEQ ID NO: 16295 - DNA, 20 bp, Artificial Sequence
  Synthetic
gtgtgatctcggctcaccac

SEQ ID NO: 16296 - DNA, 20 bp, Artificial Sequence
  Synthetic
ccctgactttggagctcagc

SEQ ID NO: 16297 - DNA, 59 bp, Artificial Sequence
  Synthetic
ctcctgaggagaagtctgccgttactgccctgtggggcaagggtgaacgtggatgaagt

SEQ ID NO: 16298 - DNA, 58 bp, Artificial Sequence
  Synthetic
ctcctgaggagaagtctgccgttactgccctgtggggcaagatgaacgtggatgaagt
